United States Patent Application Publication US 2003/0099974 A1 - sequence listing, part 6

SEQ ID NO: 13631 - DNA, 4611 bp, Homo sapiens
actccagtgtctcgtttgcagtcggcgctttaggggaactgtcttcctccgcaggcgcgaggctgggtacagggtctattgtctgtggttgactccgtactttggtctgaggccttcgggagctttcccgaggcagttagcagaagccgcagcgggccgcccccgcccgtctcctctgtccctgggcccgggagggaccgaacttggcgtcacgcccctcagcggtcgccactctcttctctgttgttgggtccgcatcgtattcccggaatcagacggtgccccatagatggccagctttcccccgagggtcaacgagaaagagatcgtatttttatttttccttttagtgagatcacgtactataggtgaacttttagctcctgcagctccttttgacaagaaatgtggtcgtgaaaattggactgttgcttttgctccagatggttcatactttgcttggtcacaaggacatcgcacagtaaagcttgttccgtggtcccagtgccttcagaactttctcttgcatggcaccaagaatgttaccaattcaagcagtttaagattgccaagacaaaatagtgatggtggtcagaaaaataagcctcgtgaacatattatagactgtggagatatagtctggagtcttgcttttgggtcatcagttccagaaaaacagagtcgctgtgtaaatatagaatggcatcgcttcagatttggacaagatcagctacttcttgctacagggttgaacaatgggcgtatcaaaatatgggatgtatatacaggaaaactcctccttaacttggtagatcatactgaagtggtcagagatttaacttttgctccagatggaagcttgatcctggtgtcagcttcaagagacaaaactctcagagtatgggacctgaaagatgatggaaacatgatgaaagtattgagggggcatcagaattgggtgtacagctgtgcattctctcctgactcttctatgctgtgttcagtcggagccagtaaagcagtggtggcagcaatattggtgtgattgaggttatgctggcaccactcgcacacaggcgcacaatggtgttagctgggcagaaagagtggcatctctggctaccgggctgggggcgacctttaccataggatgaagtaaccttgcattcggctgcaaggtgtactgtacgtacacaggtgctggtcgatgtccactttctgcttttctttctttctttttttcttttttaaagtaatttcccccacagtaaaatacactgactcctgagtaaattgattttccagttttatggaattgggagtctgacaagtgaaaccaatttaatgtaaagtatttggctttcaaatggtttctctgtgctattttttggaattctttcagattccagagatatcttacgtctttgattcaatttaaaatttgtacttattttcttttagaaataatgtattgtgtctgtgcagaaaaaaaaaaaaccaaaaaggattgctttactccaagaggagagattgtcttaggataaacctccaagctcacatttaatataacagactgaagtaaacattagaatcctgtttagagctattctgcacagttaactactgatctttagaatctaaaattgtatatgaacttattcttaaataattgaaccgttttatattcaaatgacttatgatcgtggttagtttgggaaaaataagatggttaaattttgatttattgaaatgtaattgtattattttcataaaatagcattttcattttgtaatgtggtttaacatccttgttgtttgccaaagaaatttcatttggctgtgaatattctatttgcttgcagtatctgtttctcttcctaggctcaagttggtgacccaagcctattgtaaacaagtgattatctcaaagggagatgccaatggagtaacaatttgttaaccttacgttttctgtctgtatatttttttaaaaatctggtagtttctggaaaaaaaagagaagggggtttgtagtacttaaccctatttatttccgtatattttagttaattagtttttggaataaatggatttcagtatagctttgtggttaaattgcattgcctttattttatgtttaggcttatttttaaattaacatttaacagaaacatttgaaatagaatttgcatgtctgccttaattaacttaaagactgattttaatctgactatgacactgagcatattctttaaattactcataatttataatgcttaatataatcttaattaaatttagcagttttagtataagatgtgccattttgtcctctgtatgtctgaatgaagctataacatttgcctttttattgcaggttttcctttggaatatggataaatacaccatgatacggaaactagaaggacatcaccatgatgtggtagcttgtgacttttctcctgatggagcattactggctactgcatcttatgatactcgagtatatatctgggatccacataatggagacattctgatggaatttgggcacctgtttcccccacctactccaatatttgctggaggagcaaatgaccggtgggtacgatctgtatcttttagccatgatggactgcatgttgcaagccttgctgatgataaaatggtgaggttctggagaattgatgaggattatccagtgcaagttgcacctttgagcaatggtctttgctgtgccttctctactgatggcagtgttttagctgctgggacacatgacggaagtgtgtatttttgggccactccacggcaggtccctagcctgcaacatttatgtcgcatgtcaatccgaagagtgatgcccacccaagaagttcaggagctgccgattccttccaagcttttggagtttctctcgtatcgtatttagaagattctgccttccctagtagtagggactgacagaatacacttaacacaaacctcaagctttactgacttcaattatctgtttttaaagacgtagaagatttatttaatttgatatgttcttgtactgcattttgatcagttgagcttttaaaatattatttatagacaatagaagtatttctgaacatatcaaatataaatttttttaaagatctaactgtgaaaacatacatacctgtacatatttagatataagctgctatatgttgaatggacccttttgcttttctgatttttagttctgacatgtatatattgcttcagtagagccacaatatgtatctttgctgtaaagtgcaaggaaattttaaattctgggacactgagttagatggtaaatactgacttacgaaagttgaattgggtgaggcgggcaaatcacctgaggtcagcagtttgagactagcctggcaaacatgatgaaaccctgtctctactaaaaatacaaaaaaaaaaaaaattagccaggcgtggtggtgcacacctgtagtcctagctacttgggaggctgaggcaggagaattgcttgaacccaggaggtggaggttgcagtaagccaagatcacaccactgcactccaacctggacaacagagcgagactccatctcaaaaaaaaaaaaaaattgtgttgcctcatacgaaatgtatttggttttgttggagagtgtcagactgatctggaagtgaaacacagtttatgtacagggaaaaggattttattatccttaggaatgtcatccaagacgtagagcttgaatgtgacgttatttaaaaacaacaacaaagaaggcagagccaggatataactagaaaaaggatgtctttttttttttttttactccccctctaaacactgctgctgccttaattttagaaagcagcttactagtttacccttgtggtataaagtattataaattgttgtgaatttgaagaatccgtctactgtattattgctaaatattttgtttatactaagggacaattattttaagaccatggatttaaaaaaaaaaaaaaaaactctgtttctgcaggggatgatattggtgagttgccaaagaagcaatacagcatatctgcttttgccttctgttgtttatcttacctgcagatattaagaatgtatgcattatgtaaaatgctcaattatatatttttgttgagttttttaattaaagacttgtaaaaaaaaaaaacagtatattgcaaatgtttcttaaataggttaggtggagtactttctctctgtctccattgtaaggttgatggtacaccacaggcaaattaagcaaaaaggacaatgaagaaagaatgcaggactcaggcgctgctctagaattcattcagggctccccgagtgcagcagctcttatggtggttttgtttttaggagaactgttgtaataatgcatattttaaaagcatagggaagctctagaacacaggaaggtgactactaagcaagagaaaagtatcttttagtggggaactaccagcctatagtaagtctatctggttaaagtagttattatgaaaatctagcagtctgggtcctttgagaaggcattaaaaaagcaaaactcttatgagccatgtgtgattttgaagactca

SEQ ID NO: 13632 - DNA, 795 bp, Homo sapiens
  misc_feature 1, 2, 3, 4, 5, 6, 767, 768, 769, 770, 771, 772, 773, 774,775, 776, 777, 778, 779, 780, 781, 782, 783, 784, 785, 786,787, 788, 789, 790, 791, 792, 793, 794, 795: n = A,T,C or G
nnnnnngatttccattttattccttacatacacggtatagtcccgccgcatgtactaatcatagcaaataaaggggaagccgtgcagttggaaacagccatgcctggtgcaaatgctgccattgtttaattgttgatgatgctgcataagaatccttaaggtagaagcaatcttgaccttttttatttttgcaggcccctgccagtgcccttctccagactatattcttaaaaattaaagtgctttggtttgtagagttgactgtatgtatctccaaaatgaatatgcagcagtgattttttttttcctccctgatctctttcctgctttggtaattctgtgagggtataatcatattggggctgtccttggcaggttaggtgacatacaagaacatgcggttccacagcagtcctgtcattctcgggtaagaacatcaaagtgagttgcagcacttctgcattcatacacgtaaatctcaatctggaaggaagatagaatctaccatagtgaatttctccagaagttttacgcttgagtgcacccagatctgtaggcgttgacccaatccagttgccctagggaaattctagacccaggagatcctaaccgggctgtaatttcccagatcacttctaacctgaagcagacgtaccaatgactccttaccttgcagagcctatgcttaggatgccaagtgaatttttcatttgaattgcttcagtgattataaaacatgaaacatagctttgcagatttctaacccnnnnnnnnnnnnnnnnnnnnnnnnnnnnn

SEQ ID NO: 13633 - DNA, 732 bp, Homo sapiens
  misc_feature 1, 2, 710, 711, 714, 715, 722, 723, 724, 725, 726, 727, 728,729, 730, 731, 732: n = A,T,C or G
nnactacgggacctgttatctggtactcagtgtggttctaggaccaccggcatcacttgggggcttgttagagatgcagagtctcaggccccaccccagacctgaatcacacactgcatttcaacaaggcccacaggtgactgcagcgtgtgttaaagtatgagaaatgccaccagggaggagaggcccacaccagtccagagactagtgattcagagcatcactacccaagagaactttacgcagtgatgcaaatgttccgtctgtctctgtgctggccagaattaaccgctagtcacatggggcctttgaacataaatgtggctagcacaactcagaaactgaatattaaatgtagtaagatttcgttcatttcaatttaaagagccacgtgtggctaatggtaacaatactggacagagttctagttctagagtgcggcttttctgttgccccaaacttttcagtgcacctgagctgcaatgggctgggaagtaccctcactgaacctctgcatattttttccaggcatcctgtacacgtcaaagaagagcccctcgatccagaggaagctgaagggcccctgtccttagtgacaacagccaaccacagtccagattttgaccatgacagagattacgaagatgaaccagtaaacgaggacatggagtgactatcggggcgggccaaccccgagaatgaagattggnnatnnattaaannnnnnnnnnn

SEQ ID NO: 13634 - DNA, 528 bp, Homo sapiens
  misc_feature 522, 523, 524, 525, 526, 527, 528: n = A,T,C or G
actttttttttttttttttggggatagagaaagccttcctaaacaaggtaagaaaatatacaaaacttccacttgtcaagtagttataaaatgaagtcaacaggtaatggcaaagtagaaaatatatgcacagcatatctaccaaagtgtaataatccttccataatatataaataactcttagttattcactaaattaaaagatacaaacagcaaatagggcagtttaagactgggcaaagaataaataagccattcacccaagaagacgatcatataaaataatacttgactggaacagtaacagggaatgccaattttaaaaaaggtatcattcttcacccaccagattgaatattattaatacatttttgcccaaatctgaagaggatgtaagaaaataaaaattctcaaacattcaaacaaaaagttgagcagtccattaaagtgacaatagctaaaaaattgacacctatactatggcatacaatgcagccatttaaaaaaacgttgtcttaatcnnnnnnn

SEQ ID NO: 13635 - DNA, 308 bp, Homo sapiens
ccctttcgagcggccgcccgggcaggtactggtgaactccctcacttgaatttctcgttcttatgaaggtgctttcttgcttggatagttgttcagtgtgacattcctgcagggtgaacaattgctagagggttctattcagccatctttctccacctcacatccatgtttttgcatgttatttctttccttttattgattagcatttgattccatgaatatagcacaatgtatataaccactattcttttctggaaaacttatgtccaggttggggttattatgaataaggctatgaaatttcaggt

SEQ ID NO: 13636 - DNA, 2591 bp, Homo sapiens
  misc_feature 1, 2, 2517, 2519, 2520, 2554, 2555, 2556, 2557, 2558, 2559,2560, 2561, 2562, 2563, 2564, 2565, 2566, 2567, 2568, 2569,2570, 2571, 2572, 2573, 2574, 2575, 2576, 2577, 2578, 2579,2580, 2581, 2582, 2583, 2584, 2585, 2586, 2587, 2588: n = A,T,C or G
  misc_feature 2589, 2590, 2591: n = A,T,C or G
nnacccacgcgtccggcttcgacggcccggccgccattttctttctttcttagctgttagctgagaggaagtctctgaacaggcggcagcggctcttatagtgcaaccatggcagactattcaacagtgcctcccccctcttctggctcagctggtggcggtggtggcggcggtggtggtggaggagttaacgacgctttcaaagatgcactgcagagagcccggcagattgcagcaaaaattggaggtgatgcagggacatcactgaattcaaatgactatggttatgggggacaaaaaagacctttagaagatggagatcaaccagatgctaagaaagttgctcctcaaaatgactcttttggaacacagttaccaccgatgcatcagcagcaaagatctgtaatgacagaagaatacaaagttccagatggaatggttggattcataattggcagaggaggtgaacagatctcacgcatacaacaggaatctggatgcaaaatacagatagctcctgacagtggtggccttccagaaaggtcctgtatgttaactggaacacctgaatctgtccagtcagcaaaacggttactggaccagattgttgaaaaaggaagaccagctcctggcttccatcatggcgatggaccgggaaatgcagttcaagaaatcatgattccagctagcaaggcaggattagtcattggaaaagggggagaaactattaaacagcttcaggaacgggctggagttaaaatggttatgattcaagacgggccgcagaacactggtgctgacaaacctcttaggattacaggagacccatataaagttcaacaagccaaggaaatggtgttagagttaattcgtgatcaaggcggtttcagagaagttcggaatgagtatgggtcaagaataggaggaaatgaagggatagatgtccccattccaagatttgctgttggcattgtaataggaagaaatggagagatgatcaaaaaaatacaaaatgatgctggtgttcgcattcagtttaagccagatgatgggacaacacccgaaaggatagcacaaataacaggacctccagaccgatgtcaacatgctgcagaaattattacagaccttcttcgaagtgttcaggctggtaatcctggtggacctggacctggtggtcgaggaagaggtagaggtcaaggcaactggaacatgggaccacctggtggactacaggaatttaattttattgtgccaactgggaaaactggattaataataggaaaaggaggtgaaaccataaaaagcataagccagcagtctggtgcaagaatagaacttcagagaaatcctccaccaaatgcagatcctaatatgaagttatttacaattcgtggcactccacaacagatagactatgctcggcaactcatagaagaaaagattggtggcccagtaaatcctttagggccacctgtaccccatgggccccatggtgtcccaggcccccatggacctcctgggcctccagggcctggaactccaatgggaccatacaaccctgcaccttataatcctggaccaccaggcccggctcctcatggtcctccagccccatatgctccccagggatggggaaatgcatatccacactggcagcagcaggctcctcctgatccagctaaggcaggaacggatccaaattcagcagcttgggctgcttattacgctcactattatcaacagcaagcacagccaccaccagcagcccctgcaggtgcaccaactacaactcaaactaatggacaaggagatcagcagaatccagccccagctggacaggttgattataccaaggcttgggaagagtactacaagaaaatgggtcaggcagttcctgctccgactggggctcctccaggtggtcagccagattatagtgcagcctgggctgagtattatagacaacaagcagcctattatgcccagacaagtccccagggaatgccacagcatcctccagcacctcagggccaataataagaagtggacaatacagtatttgcttcattgtgtgggggaaaaaaacctttgttaaatatatggatgcagacgacttgatgaagatcttaattttgtttttggtttaaaatagtgtttcctttttttttttttttttttgaaaatgtacaaaatatctatcactactgataggaggttaatatttctgtgtagaaatgaaaattggtttgtttttagtatttagtgtagatgtacacattccagcaaatgtatttgcaattatgtggttgatgctttgtgatataaatgtactttttcaatgtatactttcacttttaaaatgcctgttttgtgctttacaataaatgatatgaaacctcaaaaaaaaaaaaaaaaaaaaaaaaaaaaaaaaaaaaaaaaaaaaaaaaaaaaaaaaaaaaaaaaaaaaaaaaaaaacaacaaacccccccaaaaaaaaaaaaaaaaaaaaaaaancnnaaggggggccccttttttttttttaaaaaaaaannnnnnnnnnnnnnnnnnnnnnnnnnnnnnnnnnnnnn

SEQ ID NO: 13637 - DNA, 1863 bp, Homo sapiens
agagatgggctttcatcatgttgcccaggctgggcttgaactcctgggcttaagtgatctgcctgcctcggcctcccacgtgctgggattataggcatgagccaatgtgcccggcctcaaccatttcttgataagttaagggccttcacagtaatatcaattactgtgcttggctataaagtcattacactggagagcatataactgatgctcagaatgaaggctctgaaatcatcgagaaatggtttggctgctcagaactctttctttttccttctttcttgctcatggattttcagctgtccattccctactggagggctgggtccaactgcttgttcactggcacagtgccttccatgtacaaagtgatcaaacctgtctattaattaagcaaatgagtggtgaatcactgagacggctggatggctgagctgagggatgtgatgtgtgcccaacgtcctgcagggtgctggtgaataacatgagaaagaacttaaaatggcttgatgatctcaccatttagtgaccttggttgtcacactgctttccaagagccctttaaaggtaggaatgagagctgtttccagtatgcattccaataggaatgcagctttgctaaagttagagacataaactaaaaccctgtgaagtcctatagagcccttggacttatttcctagcaagcatttatcatccccaccatcctctacttcaggacacttgagcagaaacagtcaaggtttttgccgttttcatcctgctcttcaaaacactgtaagtagtggcgcaggtaagcacagccacaggtgaagaccgttttcagctgaggctgcacatcagaaccacagatcacaggggatggtgcgtgacaatcgtctcagttctcccagtaatgcccatgctagccccaggctcgatgccaggagggaagtgcattccttactgagggagggcatcaggcgtgggtcttccacggaaccccaataggaatcagcaacccccaagcagatattactcaaaggtggtattacatacaacagtagtcagactcagacttcaagcagcccaaagagtggaaccacaggcttgcacaattataaaatgtttttatttcaattacataataacacgttttcctcaaattttattgaggttttggtctttttgcattcaagtctatcttgtaacagtaatatgaatccacataatttcataaaatgtcaacaacattcataaggtacattcctttgtgattttatattttacaattttaaatctaactttacaattattttaaaaaatttttttatatagaaaacagatattttcttcaggcagatcaaaacaagaattttccagtaagaatatactgggacataacaaatgaaaatatttataccaaaataccaaaagtgattcagctctttaaaatatcctactatagtctaattagtagcttgtacaagaacaagtaaccattttttactgctcttttgaatgatgattagaaattcaaacaaagtattttaaggttcaaaaactttttttttttttttttttttttttagagacagtgtctcactctgtctcccaggctagagtacagtgtgcaatcatagctcactgcagccttgaactcctggcctcaagcaatcctcccaccttggcttcccaatgtgctaggtttacaggcgtgaaaacattgtgttgtgtgtgtgtgtgtttttttttttttttttagacagagtttcgctcttgttgtccaggctggagtacaatggcttgatcttggctcactgcaatctctgcctcgcaggttcaagcgattctcctgcctcagcctctggagtggctgggatt

SEQ ID NO: 13638 - DNA, 580 bp, Homo sapiens
  misc_feature 578, 579, 580: n = A,T,C or G
acttttttttttttttttttttttttttgagacagagtctcgctctgttgcccaggctggattgcagtggtgtgacctcggctcactgcaacctctgcctcccgggttcaagcgattctcctgcctcagcctcccgagtagctggggttacaggcgcccactaccacgccaggctaatttttgtatttttaaatagagaccgggtttagccatgttggccaggctggtcttgagctcctgacctcaggtgatccacccgccttggcctgccaagatacagttcttaaaaagtagtcttgacacatcattcaagacatttttcgttaattgaaaagcctgctattaagtgtttataagcctctatggtagttactgcattattcttgtggagccatcacaggtcctctccccttccttgtaatgatgtgtttaaagttctctgaaaacatggaaaagatgctgtaggcataaatcaaaaagtcacttaaaccactggatgcccatttctcagtgccgggtcaaacaaatgccttgaggacctgtggcttggacatgtgtgtttcataaggatgtcctannn

SEQ ID NO: 13639 - DNA, 3730 bp, Homo sapiens
  misc_feature 3397: n = A,T,C or G
cgtccgcagcgaggcccggggaggccgcggcggaggcggaggcccggcgccctgggcggcgccctgtccccgaagtccgtcctccccgttaggtggcgagcgcccgaggggaggggacagccgggcaagcaggaagctgcggcttaaaagggcaacccgcgcgggacccttcctccctagtcgcggggagtctgagaaagcgcgcctgtttcgcgaccatcacgcacctcccctccgcttgtggccatgtaccgctacctgggcgaagcgctgttgctgtcccgggccgggcccgctgccctgggctcggcgtccgccgactcggccgcgttgctgggctgggcccggggacagcccgccgccgccccgcagccggggctggcattggccgcccggcgccactacagcgaggcggtggccgaccgcgaggacgaccccaacttcttcaagatggtggagggcttcttcgatcgcggcgccagcatcgtggaggacaagctggtggaggacctgaggacccgggagagcgaggagcagaagcggaaccgggtgcgcggcatcctgcggatcatcaagccctgcaaccatgtgctgagtctctccttccccatccggcgcgacgacggctcctgggaggtcatcgaaggctaccgggcccagcacagccagcaccgcacgccctgcaagggaggtatccgttacagcactgatgtgagtgtagatgaagtaaaagctttggcttctctgatgacatacaagtgtgcagtggttgatgtgccgtttgggggtgctaaagctggtgttaagatcaatcccaagaactatactgataatgaattggaaaagatcacaaggaggttcaccatggagctagcaaaaaagggctttattggtcctggcattgatgtgcctgctccagacatgagcacaggtgagcgggagatgtcctggatcgctgatacctatgccagcaccatagggcactatgatattaatgcacacgcctgtgttactggtaaacccatcagccaagggggaatccatggacgcatctctgctactggccgtggtgtcttccatgggattgaaaatttcatcaatgaagcttcttacatgagcattttaggaatgacaccagggtttggagataaaacatttgttgttcagggatttggtaatgtgggcctacactctatgagatatttacatcgttttggtgctaaatgtattgctgttggtgagtctgatgggagtatatggaatccagatggtattgacccaaaggaactggaagacttcaaattgcaacatgggtccattctgggcttccccaaggcaaagccctatgaaggaagcatcttggaggccgactgtgacatactgatcccagctgccagtgagaagcagttgaccaaatccaacgcacccagagtcaaagccaagatcattgctgaaggtgccaatgggccaacaactccagaagctgacaagatcttcctggagagaaacattatggttattccagatctctacttgaatgctggaggagtgacagtatcttactttgagtggctgaagaatctaaatcatgtcagctatggccgtttgaccttcaaatatgaaagggattctaactaccacttgctcatgtctgttcaagagagtttagaaagaaaatttggaaagcatggtggaactattcccattgtacccacggcagagttccaagacaggatatcgggtgcatctgagaaagacatcgtgcactctggcttggcatacacaatggagcgttctgccaggcaaattatgcgcacagccatgaagtataacctgggattggacctgagaacagctgcctatgttaatgccattgagaaagtcttcaaagtgtacaatgaagctggtgtgaccttcacatagatggatcatggctgacttcctcactatcctcttcacatgtaacttctgcagacctatcacaagtttacatgtaaccacagaaatccctttctctcctgactcattaataatggataccattctcaacaagtcaatccaagtcagcccgttaaggagaaagaaattaaggttagcggatcatgtacaagctgagtgtgaaagtagaaatcacctacaccagagagccattttggtattttgcctttaaataaaaagcctcctttatctggctgtgcagccttgctctgtggcttttcccaacacaatcagtgctagtgctggggaggaacagtcaagagcagtcagttgcttgcttattttttctggatgagtctgggacacactgtaactttaacacatttaagaagtaggtgtgtggccttttcagaaggtggcatggtcctcaagtgagttcttagtattttatatcagcaaaataattcaattttgcaggttgcaaacaaatataaaacctgtttctgtttatgaatattattcttttagaatagaataagtacatgctgctgtaataaaattgcctttaatcacttaacaagcctaaccttgactcaaacagtgaatgcctatagaaataataaatgaaaaaaactagtatttttatatcataaaacaatgtcatttatagcttatcattcatgtattgtccagcagacattaaaagccctgtggataattaagttatcttcatacctgcaaaatggtggaggctattttcattaaaactgtcagaatttgcttactataattatgatacagtccaaagaatgcagtcactttttatcatgttaactaattgttctcttttgaagatctatggttgactaattaaacaataattcaagtagagtgtcccagaaaaaaaaccacttgggctccctgtttggagtctggctggctctgagcattgccaatggcccctactcacctgactttgtatcctctccttttagaggctttgcattctgcacccagcttcactaacagtgggctgaaaacatccttgggttgagtgtttcatttgggagttatttggccagggccttttgaacagtagtgtccccatgaagtgctagataatatatgtgtaagagtcagctttttttttttttttaactctaacacccttcagaaatttctaactactttgtaactgcatggcttaacctggtgataaaagcagttattaaaagtctacgttttccaacttccatattgagactagggactagtgcacagacgtaaatcctctttagtcaggggtaatatctttgctccaaatcaggcccgagcttacttgtctaagactgtgcctttcttggcagagccattcctcctaactgaggcttccatatcacttcggaaattttaacaaaccggaataggctattgggctcatattattgaccctccaaanccgagcatgaaacccttggatgtcttcggtacccaccgaatggccattgacgggcaacatccccccttgccggtctataaaccacccgcttggtattgggaatcaatcccaactgcttcatgaaattttttaaaaccgctcccccacaaattccatcgataacacattggcccctctttccccccactggaaaatcttattggaaaaaggttgcttcgaaataattggttgtaataaaaaaggggttacaacaaaaaaaatttttaaaacccaccttttctcatggggggggggccctctttttttgcgggtaaagaagccccgacaaaacgg

SEQ ID NO: 13640 - DNA, 282 bp, Homo sapiens
acgcggggggtgcctgggttattacatttagcagaaacccttctagctgactccctgaatggatgaccttgtttaagaaagaaatgtgttcatggctctatctaatgttcctcctctccggaactactttctggaagaagacaattataagaacatcaaacgtcctccaggggatatcatgttcttgttggtccggcgttttggagagctgatgagaaagctctggaaccctcgaaatttcaaggcacatgtgtctccccatgagatgcttcaggcagttgt

SEQ ID NO: 13641 - DNA, 515 bp, Homo sapiens
  misc_feature 1: n = A,T,C or G
nagaatgtaaaatgttctacttgggcatcgtgtcagtgctcagagttttaagttttggacttttgtgggttttggactttttaaaatgtgtttatttatttatttattgagatgaaatctcactctgtcacccaggctggaggttctgtctcaaaaaaaaaaaaaaaaagtcaaagcagcagtttatgaccttaaggcatttagcaaacttaatatctgacctgcataatttagaccaaatgtctttattttaccagtaatctttaaaactgtttttatttcccaaagattacttaagtcacatgaactaaaaggcattacactttttacttatgtgacaaaatatttgatttaagcttattattattaaagcaattaattaaaattcttttatattacacacacatactacatataaatacatagacaaacagaagacaaaggatgatcccttaagctgggaattcaaccccgaacccgggctgccattgtgatggcagagaccaagagaaagt

SEQ ID NO: 13642 - DNA, 3440 bp, Homo sapiens
  misc_feature 1, 2, 3437, 3438, 3439, 3440: n = A,T,C or G
nncgacccacgcgtccggcggcgcagcaccgcgggctccccgcccgccgctgccgggagtgggacggggccggccgtgagctgcgcaccggctgcgggagccggccggctgctgcagcccatccgcgccacggtgccctaccagctcctgcggggcagccagcacagccccacgcgccccgccgccgccgccgcgctcggcagtctcccagggcccagcggggcccgtggccctagcccgtccagcccgactccaccgccggccacagccccggccgagcaggcgccgcgggccaagggccgcccgagacggtccccagagagccaccggaggagcagctcacctgagagacggagccccggctcgcccgtgtgcagagcggacaaggcaaaatctcagcaagttcggacctctagtacaataaggcgaacctcctctttggatacaataacaggaccttacctcacaggacagtggccacgggatcctcatgttcactacccttcatgcatgaaagacaaagctactcagacacctagctgttgggcagaagagggtgcagaaaagaggtcacatcagcgttctgcgtcatgggggagtgctgatcaactaaaagagatcgccaaactgaggcagcaactacaacgcagtaaacagagtagtcgtcacagtaaggagaaagatcgccagtcacctcttcatggcaaccatataacaatcagtcacactcaggctactggatcaaggtcagttcctatgccactgtcaaatatatcagtgccaaaatcatctgtttcgcgtgtgccctgcaatgtagaaggaataagtcctgaattagaaaaggtattcattaaagaaaataatgggaaggaagaagtatccaagccgttggacataccagatggtcgaagagctccacttcctgctcattaccggagcagtagtacccgcagcattgacactcagactccttctgtccaggagcgcagcagtagctgcagcagtcattcaccctgtgtctcccctttttgtcccccggaatcccaggatggtagcccttgctcaacagaagatttgctctatgatcgtgataaagacagtgggagtagctcaccgttacccaagtatgcttcatctcccaaaccaaacaacagctacatgttcaaacgggagcccccagagggatgtgagcgagtgaaggtctttgaggaaatggcgtctcgtcagcctatctcggcccctctcttttcatgtcctgacaaaaacaaggttaatttcatcccaaccggatcagctttctgtcctgtaaaacttctaggccccctcttacctgcttctgaccttatgctcaagaactctcctaactctggccagagctcagctttggcaactctgaccgttgagcagctctcatcccgggtttcctttacgtctctttctgatgacaccagcacagcgggctccatggaggcctctgtccagcagccatcccagcagcagcagctcctgcaggaactgcagggtgaggaccacatctctgctcagaactatgtgatcatctaaaaaagggggagctggcctccaccctatgttccatggattcggaacaagatttcagacatctgcatgagtgacaaactttctgaacaccaccaccaccaataatacttatcagcatcataaagtatctcttaaacactgatcttggcagggacggaactcctattcagcagtttttgtggaaagcagtaatgcttgcaaaacgtgtgtgtcattcagcattttaagtggagactatgcatttcatagtatatttgacagattagtactgtgtcctgtgttttgttccagattcttcagtataaataagctctatatcaaaaagttgcctgtctaaatagaaaatgtcttgctgtgttttgtcctatggaaaatactgtaattcaggattatgtttacaattgatccaggtgtttgtttctaacttctgtaatacatacaatgcaaaaaaaaaaaaaaaaaatggccacaacagttgcacagtgcccaccctatggcctagcttcaggtacttcagttgaagtctaaactcaggtaacttggaatgtatatcatattgggatattaaatatttcacagctaaaaagctaaagagggaacatcactcttttgcctttccttattttatgcatttccctttcctcattacattccacattcttagaataagaagtgcattcaatcctaggagaatgataatcctggacatgggtgaacatgaggagaaccagcaaaatctgtggtgtttgacatcactttgtcatgtggttacaagtaaaacaactgttgcattcactgtttcaacatgtgtacatgtggcttttttaaaagttcaggtgttgctcagtaaaggactgtgacaatgttgcaaataaagtgttcagtactggactgtacataaacattccacattgtgtgtgatgaaatttaaagacaagaatgtctagagttaatttcaaaataagtgaagtgtttgacggaatggttgagatttttttgtttatgttagccatcagggtcataactgttaccattttatctaaagacatatttatatttagtttctcccttggaaattctttattttgcaggtgaaaaagtgacatactttttgttattgtcttcctcaagcagtttaggtgcatgatcttcatttacatagaatacttgggtctcagaattgatgcaacataagcaggttttttggtgacttacaagagcaatagtttgaagctatctcatttaagcctctcataatgcataatcatgagtagttttgaaatttgcaacctgtgaggtagagcataaactcaagaaaatagccttgaacttgcagacttttgacacaagttctccacaaagtgtgaagagagccccaggcattcctgattggtcaatgggagagcctaactttcattgttttcttcagtacaaagagtatccaaaagctaagtttttgtattccactactttcagttcaataaaacctagagttgtttcatctgcgcctaaagtgtatggcacaattttcttaagaattaggggaaccaggtgcctacagttaaaggaacgtttcagttcctttcattcattcctgggtttttcttttattttctaagaaggttgaagaaggatgagtgatagagaagaaagcaacaccattgatttttttttttaagaaatgatatatatatgtatatgtttgtgtgtgtgtgagagtaggtagcggcgtgtactcagggcaaatacatggggagagatctcaaatctttttttccaaccaaaggtgtggaaacatttcccccgaaggggattctgggtccttaaaaaacggggttttggagaaagggtcgacaagggcgagattagattcaacnnnn

SEQ ID NO: 13643 - DNA, 732 bp, Homo sapiens
ggatgcgaggctcggagcacccttgcccggctgtgattgctgccaggcactgttcatctcagcttttctgtccctttgctcccggcaagcgcttctgctgaaagttcatatctggagcctgatgtcttaacgaataaaggtcccatgctccacccggaaaaaaaaaaacaaaaaaaaacataaaaaaagtccctcggccgcgaccacgtcgagcggccgcccgggcaggtacaaaagccaagatgcccattgtgggcctgggcacttggaggtctcttctcggcaaagtgaaagaagcggtgaaggtggccattgatgcagaatatcgccacattgactgtgcctatttctatgagaatcaacatgaggtgggagaagccatccaagagaagatccaagagaaggctgtgatgcgggaggacctgttcatcgtcagtaaggtgtggcccactttctttgagagaccccttgtgaggaaagcctttgagaagaccctcaaggacctgaagctgagctatctggacgtctatcttattcactggccacagggattcaagactggggatgactttttccccaaagatgataaaggtaatatgatcagtggaaaaggaacgttcttggatgcctgggagatcgagaggctcttgaacaaacctggactgaaatataaaccagtgactaaccaggttgagtgtcacccatacctcacgcaggagaaactgatccagt

SEQ ID NO: 13644 - DNA, 3443 bp, Homo sapiens
  misc_feature 1, 2, 3, 3435, 3436, 3437, 3438, 3439, 3440, 3441, 3442,3443: n = A,T,C or G
nnnctggcttctcgagggtgttcagagtctcccaagtgcacaggggctcgtgcccaaagggtggaggtcggtcgtacctcgctcaatccaggagtggagaaggaagctagaggaccgtctggggtttactgttttaatgtcctgcttttttatttatttatttatttatttatttatttatttattttgtaatcaactgaaagaaggcagaaggagtcgatgggcctcttaggccggaaaccttacaagcataggaccaaggcagaaaaggtccagagggttcatggtcctccgttccacctgaatccagctagagagcgagccagggggataggtgtgcccctcgtcgcccgtgcgctgaggcactgtcacgcaaagagacattcaccttccacgtcaacgcacctttaagggcgagagcggtccgccgtgcccaagaggaacgggatgacattcaactgggacttgcctcaccttggcttgggggacctcgagagcggtcccgtgggggcggtgttactcgtggtggtagaagtggagggcgtgtccgggtacttgagttcatgggcatctctcccgccgcctctcagcctatctgcaccatgtctcacacgttcagttgcagctcttaccgttttgaaggcgcacgtgggcaagaagtcctgggcagcacaagaaagtcaatcacgttgagacagagagagcaggagaggaagtgggccccagtagaagtgggcgagagagcgttgggtgggaacgtggcacgagagagagaaattatgagattgagagagagagagagagagagagagaaagagaaagagagagagaaagagaaagagacagagaaaagaaactatgttgtttaaaatgccagcggaaagtccatgggggtgaaagagtccggcaatggccagggagttagcagcttggcgtagtgtcttcccactgttttgtctgtcttgagaatagcattcaacgcgactgtgttcccgcagcagacgttaggccgctgcccacgccttgagtgccggacgaggtcaacataggctttccgtcacagaatatgtttgggcaggaagatcggaacacttggggctgggccatctaccgctcccccacggcacacacgagtcgtcagggaaatgcccgcctctgtgtgtgttgtacgtgcagccttctgggcagagccgtggagagttggacgtaggccaggtgtgaggaggagaggtgtgtttggggtggccactggctcccttcctgcgtgacgtaggctggcgtgggctcttcccccagccccttgccggtgctgccacgtgagaagggcccgggtgccggtcccgctattccggaattgtgggttcacctgaagtttgaggccaaacccccagcggtcagtgggacgccagtcgcctttgacctcttggtcaagctggccttgccgtgacccgtgagaatgcccaagtgccaatgtgtcccggggggcagggccggggctgggatcctagtgtgtgcccagtctccttctcgtccctgcgggttccaccatcctcccatcctaacgcatcgttagggatgcggttaggtcgggtccatccccagggcggtccaaggggaccgctttctggtttgtcaggaaggcaggctagtaagaagggtcccgccgagtcccatctgccaaggacagggtcccgcaggtgggccagggctggcccaaagcggccgagatgctgatccgccatgtgcggggcgctgttggcgttttttcctcagcaaagggcggagggagtggacgtgggggaagggcaggtgggcatttctggagcaatactgccatcaagaggaactggcttggcaatcccgcgcacccttcgctgtgctcgcctggggaggagtggcttgggactgtcctgggggaccaggcaggactagggcaggtgctcggacggatccgaggtctctggaggtccgagagaagcaggctccgccgcggggtcgggcggtggaagccccagagagaggcgccaggactagctggacagccaggacgccgggccgttcccggacaggaagccatggctcgggagcctggtggcggccatgatctgggcgggaccagcggaggcctccgccagggagcctgggctcggggccttgggcagtttgcctggtgccccttcccgtgggagcaaccggggtgacggcctagctgggtcctcggcccgggaggctccgtcggccacactgcacgcctgcggtgtgaggagggccgactgccagtgctgagttccgtggccattggcgccggtgcccgccgctgctggccggcgccggggcgttcctccttgcgtcctagggaggaaggtgggccgcggggcatcccgcggggcccgtacccagacggttcttgacgaggtggacgcaaggccaggcccggcccggcccggccaccttcagacgccgcgcacccgccttgttgagacttgccaccctgtcttgttgtgtccatgtccccgaggttgtcttggaggcgggccattccccgtggtgctcatttctgcctgggggccttccggggaccccgcttgtctttgggggtgcgcaggcccttgccctgcgatcagaggcgcaccgaccgatgagttcggtggcaaagcttgagaaatggagactctctgggcatcggctaagggggcccggggccttcccaggcctgctggagtccgggaagccgggggcacccagaaggaaggacccgtcggactctgcctggggacagcctgctctgcgccagaagggtccgctgctcaggcagcatccccgtgcctctcctccagtgggtccctcaggtagaatcggggcaggccccactggacgtgcagggaggaggctcggaggatgcatcctttgcaggacccggtctggtacagcagcagacggagccatctcccggggctttctggcttctccgagggtgttcaggagtctcccaagtgcgcaggggctcgtgcccaaagggtggaggtcggcaccgcttcgctcaattcaggagtggagaaggaagctagaggaccctctggaggtggcaggtttaatgtcctgcttttttatttatttatttatttatttatttatttattttgtaatcaactgaaagaaggcagaaggagtcgatgggcctcttaggccggaaaccttacaagcataggaccaaggcagaaaaggtccagagggttcatcgtcctccgttccacctgaatccagctagagagcgagccagggggataggtgtgcccctcgtcgcccgtgcgctgaggcactgtcacgcaaagagacattcaccttccacgtcaacgcacctttaagggcgagagcggtccgccgtgcccaagaggaacgggatgacattcaactgggacttgcctcaccttggcnnnnnnnnn

SEQ ID NO: 13645 - DNA, 627 bp, Homo sapiens
ccgaagtacttgttgttgctctgtttggagggtttggtggtctccactcccgccttgacggggctgccatctgccttccaggccactgtcacagctcccgggtagaagtcactgatcagacacactagtgtggccttgttggcttggagctcctcagaggagggcgggaacagagtgacagtggggttggccttgggctgacctagcacggtgaccttggtcccacttccgaagccataaccactcaggctgctgtcataggactggcagtaataatcagcctcatcctcagcctggagcccagtgatggccagggaggctgagctgccagacttggagccagagaatcggtcagggacccctgagggccgattgttgctatcatagatgaggagtttgggggctgttcctggaagctgctggtaccagtgtacatcataacctgccccgatgttggagctggtcccagtgcaggagatggtgaccttttgccctggggccccagacactgagggcggctgcgtcagcacagactgggcccaggaccctgtgcagtgagcgaggagagtgaggaggagaggagaccaggccatgctggagattgtcctgagtactgcctcttgcgga

SEQ ID NO: 13646 - DNA, 722 bp, Homo sapiens
gcggccgaggaacgcggggaaggaccggcaccgggacttcccagacgtgatctcaggagcgtatataattgaagtaattcctgataccccagcagaagctggtggtctcaaggaaaacgacgtcataatcagcatcaatggacagtccgtggtctccgccaatgatgtcagcgacgtcattaaaagggaaagcaccctgaacatggtggtccgcaggggtaatgaagatatcatgatcacagtgattcccgaagaaattgacccataggcagaggcatgagctggacttcatgtttccctcaaagactctcccgtggatgacggatgaggactctgggctgctggaataggacactcaagacttttgactgccattttgtttgttcagtggagactccctggccaacagaatccttcttgatagtttgcaggcaaaacaaatgtaatgttgcagatccgcagcagaagttctgcccttctgtatcctatgtatgcagtgtgctttttcttgccagcttgggccattcttgcttagacagccaggatgggactggtcgtgtttgtgcttttctccaagtcagcgacccaaaggtcaatgcacagagaccccgggtgggtgagcgctggcttctcaaacggccgaagttgcctcttttaggaatctctttggaattgggagcacgatgactctgagtttgagctattaaagtacttcttacaca

SEQ ID NO: 13647 - DNA, 1306 bp, Homo sapiens
  misc_feature 1302, 1303, 1304, 1305, 1306: n = A,T,C or G
ccacgcgtccgctgctcttcccccagtggcaaatgccgcgccacctcgcaaacccccaactcaggcacttgggccccttttgggccccctctcgctcctccctttaggcacctccctgggcccgcccacggtctccccccagtttgggactgcgtcataagtatcccagacctcggcttgcagtagtgttagactgaagataaagtaagtgctgtttgggctaacaggatctcctcttgcagtctgcagcccaggacgctgattccagcagcgccttaccgcgcagcccgaagattcactatggtgaaaatcgccttcaatacccctaccgccgtgcaaaaggaggaggcgcggcaagacgtggaggccctcctgagccgcacggtcagaactcagatactgaccggcaaggagctccgagttgccacccaggaaaaagagggctcctctgggagatgtatgcttactctcttaggcctttcattcatcttggcaggacttattgttggtggagcctgcatttacaagtacttcatgcccaagagcaccatttaccgtggagagatgtgcttttttgattctgaggatcctgcaaattcccttcgtggaggagagcctaacttcctgcctgtgactgaggaggctgacattcgtgaggatgacaacattgcaatcattgatgtgcctgtccccagtttctctgatagtgaccctgcagcaattattcatgactttgaaaagggaatgactgcttacctggacttgttgctggggaactgctatctgatgcccctcaatacttctattgttatgcctccaaaaaatctggtagagctctttggcaaactggcgagtggcagatatctgcctcaaacttatgtggttcgagaagacctagttgctgtggaggaaattcgtgatgttagtaaccttggcatctttatttaccaactttgcaataacagaaagtccttccgccttcgtcgcagagacctcttgctgggtttcaacaaacgtgccattgataaatgctggaagattagacacttccccaacgaatttattgttgagaccaagatctgtcaagagtaagaggcaacagatagagtgtccttggtaataagaagtcagagatttacaatatgactttaacattaaggtttatgggatactcaagatatttactcatgcatttactctattgcttatgccgtaaaagaaggaaaaaaaatttacctggggctggcaataagaaagggcgcggtggaaggaaaatgagcacttggtaaaggggaatgaacnnnnn

SEQ ID NO: 13648 - DNA, 517 bp, Homo sapiens
caccgcggtggcggccgcgagcaacaggccgtgccgggtttgcatttccttactgctttgtcttgaagacagaacgatgccaaagaaagcaaagcctacagggagtgggaaggaagaggggccggctccctgtaagcagatgaagttagaagcagctggggggccttcagctttaaactttgacagtcccagtagtctctttgaaagtttaatctcgcccatcaagacagagacttttttttcaaggaattctgggagcagaagccccttctcattcagagagatgaccctgcactggccacatactatgggtccctgttcaagctaacagatctgaagagtctgtgcagccgggggatgtactatggaagagatgtgaatgtctgccggtgtgtcaatgggaagaagaaggttttaaataaagatggcaaagcacactttcttcagctgagaaaagattttgatcagaaaagggcaacgattcagtttcaccaacctcagagatttaaggatgagc

SEQ ID NO: 13649 - DNA, 1181 bp, Homo sapiens
  misc_feature 1181: n = A,T,C or G
tttttttttttttttttgcctgtttgttcataatgtttactgtacaaagaaacaaaacccaggaatagtacaagtattgaacagtagcgagagtggttgtgaaataaaggaccactttggaagacagttttattggcttgctgtcttcaccaagaaagacttgtgatttttgaaaacttctacctgaaatgtattttttctgctttcccgaggaagcggcacttacagtgttcctaggctttcctgtgacgtgggtgccagtctggattcaaaatatccttgcatgcactgcagctccttagggagtcttttcctgcccttgaggcctgggcagactctcccctgacaccctcccgccctctcccacgacgcagcagaaataaagcacaacctcagaaagtctcaggcacgaagaactgtcctcgggtggagcatgggacctttattcgttaagacatcaggctccagatatgaactttcagcagaagcgcttgccgggagcaaagggacagaaaagctgagatgaacagtgcctggcagcaatcacagccgggcaagggtgctccgagcctcgcatcccccggccgggggcagctggaggtgcctcagaaggtgcattctgcttcctgcaggggcttgaaacaccaaggcactccagggatcctggagtcctgagctgcgtcccggagcccacggtggtcatggctgccagagcgctctgcatgctggggctggtcctggccttgctgtcctccagctctgctgaggagtacgtgggcctgtgtgagtactgccctgactgccccggtggcagggtgggcgtgaagggaagggatccaggataaggggggattctgcattcatttaataatggccacctgtcacatatacactttttcctgcgctagccctttgaagtgggtctttattgtccccatttcacagacaaggaaaccgaggctcagagaaagttaacaacttatccaaggcagccctgcccagtctgtgttgaaatcagggtttgagcctgagcccatcccctatgaccccatagccatctttgctggagatttctaaattacaatatacggtctttatgcattggtccacatttacaaagaaaaaggaaagatgcaggagaaaaaccctgacttcagaacactgtcaataccggcaggcan

SEQ ID NO: 13650 - DNA, 445 bp, Homo sapiens
  misc_feature 1, 2, 3, 4, 5, 6, 7, 8, 9, 10, 11, 12, 13, 14, 15: n = A,T,C or G
nnnnnnnnnnnnnnncggccgaggtactccagcatgtttcaactgctctacaaaagcgtggcaagaccgcttctttaagcaggtccctgatctgttcctcctcacttgggagaacttcccaaccagggtcttcagcctctcccactgatgttctctggttgacaagggtttgaaagcatcctgggacagagttactagagagaggggcaggctgccatctttgctgtttctgcaatttagccgttccagcttccaggttttggagaacccaacaccatgaggggcagaaatggtatcccagcacagctcagctgttctacaaaagtggggctagactgcttcttcaagcaggtccctgatcctgtttctactggctgggtgagacctctcaaccagggtctccatccacctcctacaggtgtgttcaggctggcaacagatttgt

SEQ ID NO: 13651 - DNA, 3897 bp, Homo sapiens
  misc_feature 3878, 3879, 3880, 3881, 3882, 3883, 3884, 3885, 3886, 3887,3888, 3889, 3890, 3891, 3892, 3893, 3894, 3895, 3896, 3897: n = A,T,C or G
tagtttgcaaaagccagaggtgcaagaagcagcgactgcagcagcagcagcagcagcggcggtggcagcagcagcagcagcggcggcagcagcagcagcagcggaggcaccggtggcagcagcagcatcaccagcaacaacaacaaaaaaaaatcctcatcaaatcctcacctaagctttcagtgtatccagatccacatcttcactcaagccaggagagggaaagaggaaaggggggcaggaaaaaaaaaaaacccaacaacttagcggaaacttctcagagaatgctccaaaactcagcagtgcttctggtgctggtgatcagtgcttctgcaacccatgaggcggagcagaatgactctgtgagccccaggaaatcccgagtggcggctcaaaactcagctgaagtggttcgttgcctcaacagtgctctacaggtcggctgcggggcttttgcatgcctggaaaactccacctgtgacacagatgggatgtatgacatctgtaaatccttcttgtacagcgctgctaaatttgacactcagggaaaagcattcgtcaaagagagcttaaaatgcatcgccaacggggtcacctccaaggtcttcctcgccattcggaggtgctccactttccaaaggatgattgctgaggtgcaggaagagtgctacagcaagctgaatgtgtgcagcatcgccaagcggaaccctgaagccatcactgaggtcgtccagctgcccaatcacttctccaacagatactataacagacttgtccgaagcctgctggaatgtgatgaagacacagtcagcacaatcagagacagcctgatggagaaaattgggcctaacatggccagcctcttccacatcctgcagacagaccactgtgcccaaacacacccacgagctgacttcaacaggagacgcaccaatgagccgcagaagctgaaagtcctcctcaggaacctccgaggtgaggaggactctccctcccacatcaaacgcacatcccatgagagtgcataaccagggagaggttattcacaacctcaccaaactagtatcattttaggggtgttgacacaccaattttgagtgtactgtgcctggtttgatttttttaaagtagttcctattttctatcccccttaaagaaaattgcatgaaactaggcttctgtaatcaatatcccaacattctgcaatggcagcattcccaccaacaaaatccatgtgaccattctgcctctcctcaggagaaagtaccctcttttaccaacttcctctgccatgtttttcccctgctcccctgagaccacccccaaacacaaaacattcatgtaactctccagccattgtaatttgaagatgtggatccctttagaacggttgccccagtagagttagctgataaggaaactttatttaaatgcatgtcttaaatgctcataaagatgttaaatggaattcgtgttatgaatctgtgctggccatggacgaatatgaatgtcacatttgaattcttgatctctaatgagctagtgtcttatggtcttgatcctccaatgtctaattttctttccgacacatttaccaaattgcttgagcctggctgtccaaccagactttgagcctgcatcttcttgcatctaatgaaaaacaaaaagctaacatctttacgtactgtaactgctcagagctttaaaagtatctttaacaattgtcttaaaaccagagaatcttaaggtctaactgtggaatataaatagctgaaaactaatgtactgtacataaattccagaggactctgcttaaacaaagcagtatataataactttattgcatatagatttagttttgtaacttagctttatttttcttttcctgggaatggaataactatctcacttccagatatccacataaatgctccttgtggccttttttataactaagggggtagaagtagttttaattcaacatcaaaacttaagatgggcctgtatgagacaggaaaaaccaacaggtttatctgaaggaccccaggtaagatgttaatctcccagcccacctcaacccagaggctactcttgacttagacctatactgaaagatctctgtcacatccaactggaaattccaggaaccaaaaagagcatccctatgggcttggaccacttacagtgtgataaggcctactatacattaggaagtggcagttctttactcgtcccctttcatcggtgcctggtactctggcaaatgatgatggggtgggagactttccattaaatcaatcaggaatgagtcaatcagcctttaggtctttagtccgggggacttggggctgagagagtataaataaccctgggctgtccagccttaatagacttctcttacattttcgtcctgtagcacgctgcctgccaaagtagtcctggcagctggaccatctctgtaggatcgtaaaaaaatagaaaaaaaaaaaaaaaaagaaagaaagagggaaaaagagctggtggtttgatcatttctgccatgatgtttacaagatggcgaccaccaaagtcaaacgactaacctatctatgaacaacagtagtttctcagggtcactgtccttgaacccaacagtcccttatgagcgtcactgcccaccaaaggtcaatgtcaagagaggaagagagggaggaggggtaggactgcaggggccactccaaactcgcttaggtagaaactattggtgcttgactctcactaggctaaactcaagatttgaccaaatcgagtgatagggatcctggtgggaggagagagggcacatctccagaaaaatgaaaagcaatacaactttaccataaagcctttaaaaccagtaacgtgctgctcaaggaccaagagcaattgcagcagacccagcagcagcagcagcagcacaaacattgctgcctttgtccccacacagcctctaagcgtgctgacatcagattgttaagggcatttttatactcagaactgtcccatccccaggtccccaaacttatggacactgccttagcctcttggaaatcaggtagaccatattctaagttagactcttcccctccctcccacacttcccacccccaggcaaggctgacttctctgaatcagaaaagctattaaagtttgtgtgttgtgtccattttgcaaacccaactaagccaggaccccaatgcgacaagtagttcatgagtattcctagcaaatttctctctttcttcagttcagtagatttccttttttcttttcttttttttttttttttttttttggctgtgacctcttcaaaccgtggtacccccccttttctccccacgatgatatctatatatgtatctacaatacatatatctacacatacagaaagaagcagttctcacaatgttgctagttttttgcttctctttcccccaccctactccctccaattcccccttaaacttccaaagcttcgtcttgtgtttgctgcagagtgattcgggggctgacctagaccagtttgcatgattcttctcttgtgatttggttgcactttagacatttttgtgccattatatttgcattatgtatttataatttaaatgatatttaggtttttggctgagtactggaataaacagtgagcatatctggtatatgtcattatttattgttaaattacatttttaagctccatgtgcatataaaggttatgaaacatatcatggtaatgacagatgcaagttattttatttgcttatttttataattaaagatgccatagcataatatgaagcctttggtgaattccttctaagataaaaataataataaagtgttacgttttattggttaannnnnnnnnnnnnnnnnnnn

SEQ ID NO: 13652 - DNA, 1145 bp, Homo sapiens
  misc_feature 1, 2, 3, 4, 5, 6, 7, 8, 9, 1143, 1144, 1145: n = A,T,C or G
nnnnnnnnnctcctccctttttcttgtgatttctcccccctgcggcccttctcccccctgtttgttgccctccacgctttctctatggcacgctcccctccgcgggccggtgcccccgtggtgccccccccgttcatgtcctctcctcatgcttgggcgcgccttcacaaccttctcacctgttcccgcttcactgaagattcccccatgacatgcgggggttggcaatacgctcctaactgaggtttgtctctggctcgtctgatggcacgtatgttcctcgcaatcccttgtgtgacttggtaccaattgtcaactaaggtaagaacattgggtgtgttcccacccacaaactccttcatcacctttgctacattggtgccgctttggtccaagttgcgggcttgggctcgtgcccgcaatttgtttactagttctaccacactgcaggtaatcccagccacagcagctgctgctcccagacccatgccagtgtccaagagcacaaaactgattccttctgtgaagggtgccagacccaggccgaggagggtcaggatgccagaggtagtgccaacagagttggacaccacattggcaatggtggtgcctctgtggacctgctcaacctcctctgcaagggcacggagcttccttatgtgatcctcaagctcccttttcaaccgaggaaactctttcaaaaaccactgcctgtgctgctggtctttatcgtggcggtttttgtccttcatgaccatgtgacttgcaagcttgttcagagctttacggagctcatctgcctcatccctgggcagttcagcagcagccacgaatccattccaggcttcatcatcagtcagcagttgtagcagattctctctgctcacttggtcctggaaatacttaaggtaatcctcaataaagatactgctctctgggttcatggtgccagcggctgggttaccgaggggctttccttggagctctccagtcactgtccagactggaaggttttccttaaccctcgttccagcttcctcttccctcactctcacaccaaggcagggtcctcttgtccaagggatcttcctctgacagagactgagcaagatccaactgttctgagctgtgtggatcccacgnnn

SEQ ID NO: 13653 - DNA, 1384 bp, Homo sapiens
  misc_feature 1, 489, 490, 491, 492, 493, 494, 495, 496, 497, 498, 499,500, 501, 502, 503, 504, 505, 506, 507, 508, 509, 510, 511,1383, 1384: n = A,T,C or G
ngtattggtggtgctggcaaaaagaaggtaacatgttttaagaaactatgtagcatagtgtcttaacacctcagtaaagtagcttggcccaccccttgtcagctcacagcacaatctggaggccacattggttcattgatcccagctggtgggcacctttcaagcctatcacaagaagttttaattttactaattggcatagaaccttcaatgcagagcggatcccattccctgtgattctacttattaatatggacactggtttaagaagcagttggatcaatgtggcccgtgttttcctggcacactggaaaggcaactgagatctcaggattgctttcctctccagttggccaagacaagtgattttagcgataagcagctttttaccagctttgctagctgtaaatagttggacattgtaaatcattgaatagaattaaggtgttgggttgttaaattaacaaataatcaagtgttctgtgaacnnnnnnnnnnnnnnnnnnnnnnngcttttcctctctactttcttggatttcttgttcatcagaaatgaagtgtctagcaggtactgagattgtaagcacggtgtggggatgcatcaccttcactgagtttgctttgatgatgctttgcatgttggcctttggacgacagttttatagtatggtcgattataatgccagtgctatttaggctggtgcaaaagtaattgcagtggcaaaaaccacaattacttttgcaccaacctaatatgttttaagatagtatattatgagcaaaggagaaaacgtttaaaatcatgtttattttgtaaactccaaaatgcatgttacatgtgaagtgactcactggaggaaggtgagtactttaccaagtaggcacttgggaaatgctgtgtccacatacttaggaaatggcttcagttaacactgggcttgggaagggctctcttatccaaggagcagtcttctctggagccatgaaaccagcctggcagcactggtaataaactagtctgtgaaatctggcaaagcctctgtcctgtttggatatacgcaaaactgccttttaccatttccattgctttttattacttaatctcccaactttgtgcctggtgtcttttttttttttttaaaatagaaaatttttgaggtaattatgtattcatataaaagtctttggtggatatgctttttcccacaagcacttggttagaatggcccattacctcatttgtttattttttgagacagggtctcttgtcacccaggctggagtacagtggcatgatcatgggttactgtacctcccgggcttgggtgattctcccacctcagcctcccttgtactgcgactaccacgccatgtctcaccagnn

SEQ ID NO: 13654 - DNA, 457 bp, Homo sapiens
ccagggatcctggggccagagtatgtaaagctcctgggactctgtgcacccctgggcagttgcttagcagagacttcatgcagctttgtgtgtcagaccaagtcttggtggagtggattcatgaggggatctcctgacccaagagttgcaaaggtccgtggaagaagtgcggttgctaggggtcacatattcattcactgtttgcctgggcagggagaggttcccttggctccatgtcctttcctagtgggctgtcgccctgctttgcttttctcctttctgcatgggttgagctctttccctgatcagtctcaatgtgagaacatgaatgtttcagttgaagttgctgtatttacttgcccctttcatttctctccatgagagccaagagtcctcactgcttctagtcagccatctttggtccagctttgtttccttgatgaatcccaatgcatgt

SEQ ID NO: 13655 - DNA, 1414 bp, Homo sapiens
  misc_feature 1412, 1413, 1414: n = A,T,C or G
cgggcaggtacaagagtaggaaagctaagtttccagctgtcatgtaagaaaagggggtaagttgaggtcatcatcgtattttttattctcaagtttacctctctcatttcttttgtgtgtcctttttttcatttttaacaccccaggccaagtttcttcctaacagtggtgattctactctggccatgtgtgcccgtgacgggcaggttcgagtagcagaactgtctgccacacagtgttgcaagaatacaaaacgtgcggcccagcacaagggagcgtcccacaagttggcactggaaccagactctccctgtacgttcttatctgcaggtgaagatgcagttgttttcaccattgacctgagacaagaccgcccagcgtcgaaactggtggtgacaaaagagaaagagaagaaagtggggctgtatacgatctatgtgaatcctgccaatacccaccagtttgcagtgggtggacgagatcagtttgtaaggatttatgaccagaggaaaattgatgagaatgagaacaatggagtactcaagaagttctgtcctcatcacctggtgaacagtgagtccaaagcaaacatcacctgtcttgtgtacagccacgacggcacagagctcctggccagttacaatgatgaagacatttacctcttcaactcctctcacagtgatggggcccagtatgttaagagatacaagggccacagaaataatgccacagtaaaaggcgtcaatttctatgggcccaagagtgagttagtaggtgagcggtagtgactgtgggcacatcttcctctgggagaaatcatcctgccagattattcagttcatggagggggacaaggagaggcgtggtaaactgtcttgagccccagcctcagctgcttgtgctggcaacagtggcctaaaacatgatgtgaaatctgggaacccacaggcgggagcttcccatggagctgaacggggatcaaagaagtgaagaaagaagaacaagcggggacacggcataagaatacgtggcccaagacgacacggcggctgagcaaatgcgggggcgacctacggacaccggagaagagaacggcacccaggcctggcagacctcgggacgcgaaccaaaacgggaaccgtagagaatatccaaccacacaaaaaaaacggacaaaagacagaaggaccaacaaaggaaagagaaggtaccagcagagtccaaacaaaggggggaaagagagcggacacgaagctgtggagcaccccataaggcggcgtcaatttgttacgacgacacttaagaatagataactgaagcgaaggaaacagacaagaagcaagacaaactaacgagaaaaccaagtacaagcgatagaaccagcgtacatgctcagccgacttgtcttgagnnn

SEQ ID NO: 13656 - DNA, 425 bp, Homo sapiens
  misc_feature 422, 423, 424, 425: n = A,T,C or G
acttttttttttttttttttttttttttatcgcgatctataataaacagagagagagagagagagagagagagactgaatgcctaatatctatcagacatggcaagctatgttcctatcctatatgtgtttctctccttaaggataggcatcatagcttattgacttctataatcctaggacttatcacagtgcgtgacacgtaagaagcaacacaaaatttgttgagtgaccatagccttcaggtaaactagaagataacctgtcactaatcatgaaatgttcttgggaaattccaacaaatgccaactccctaagtaaagaccctcttcccctggagttttccatttttccccccttgcagctaagaagtagcatcatagttaatggtccacatgttattctacaaaagggagaaaaaannnn

SEQ ID NO: 13657 - DNA, 468 bp, Homo sapiens
  misc_feature 467, 468: n = A,T,C or G
actttttttttttttttttttttggagaggtggggtctcactatgttgcccatgctggtctcaaactcctggcctcaagtgatcctcctactttagtctcccaaaatgctgggattacatttacgagtaccacgactggctggtttttatattttttaaatgtttggggaaaatgtcaaaagaagagtattttgtatgatacgaaaactacatgaaattcaaatttcagtgtccataaataagtttttctggcatacagccacactcacttgcttccatattatttatggctgtttttcacactataatggcagagttgaataattgcaacagactgtatgatacatatagcctacaatatttactattaggcccttaacaggaaaatttacttactcctgtgttaaacattattcaccagaactttgtaaaacatgttcccctgtagaaacctgtaaaaaattacnn

SEQ ID NO: 13658 - DNA, 1890 bp, Homo sapiens
cagcgcaggccgcgatatcgcagcggatcggagcaggccggaggggcaattaagaccccggccgtgtgcgtccggcctcagcagccccgccgctcggcggacacgcagaccccgccggcccgggcgcgaacactcagcgcacccccgttccactggtcccgccgcgccttccggtgcgccttccggtgcgccttccgctccgccccttcaggcaggaagtgtcggcgccgccactgtccggccacagcctaacgctcttcgctgtcgtttgcggtctcgcgcagggcggccccggttctggtgtttggcgtcggaattaaacaaccaccatgtcgagcaaaaaggcaaagaccaagaccaccaagaagcgccctcagcgtgcaacatccaatgtgtttgccatgtttgaccagtcacagattcaggagttcaaagaggccttcaacatgattgatcagaacagagatggcttcatcgacaaggaagatttgcatgatatgcttgcttctctagggaagaatcccactgatgcataccttgatgccatgatgaatgaggccccagggcccatcaatttcaaccatagataccctgagcacacagctaagagaagaagacagcttccatgcgcacacgatcctagacactatgtcatcagaacacaacatatagatctgacatatagcaatgacaggaaaccaagcaggacaaccacgattcagggacagaatgaaccctaaggagcagcaatgcatgaccaaaccacatggagggaatcgggatctacacgcactcaccgacagctgagaatgaggcatgaaacacgagcaaaacacacctcatacgaccgagcagaacaggggcaacatcgcccaagatacacaacttcggacgccatcggagaacggcgactcgcctagacagacaactggcacgccgaaagaggcgcagacccgaatggagctgacagaagcccccaccacagcgcccaacacgacactacccaagctagaacactagctcgtaaacgagaatacctatctcaacctaacacattccacaccacaatatatacaccaccaaaacaccttcaacatacgaacagtccatagcttattgccaacattcctacacctatatcaccaaatacaaccaaagacatatcatgacacgatactacacaatctactacaacacaacaacatacacacacactacccacaacacaccacatataccaacgaccaccactaactgcaacatatatctaactacacatcaacgacattcagttcacactatacagcatactacataaacatatagtaaagcaactgagatcatagaacaacaacatacattcaccataatcacacatttcataatcaagctcataacaacaccccaccacacagccacatcaataccaacaatcaacgacacctaccatactcaacacacaatcataccaacatacactacccaacctatcatccccacatccacaatgaccatcacaatcaaacatacaaccacacactccgccaacctcaaaaaccaccacacgcgcaaatcatagacctatcacacaacacacatttctaacgacacacgataaacacatcacctcattacactacacacacacactacacactaattacgaccaaacacactacgactaataacacaataaacaatgaaacgacactacacaaatcacccaatacactactctacaccaactatcgctaacatacatataataaccaaactaaaccacaagactactacaatagatcaacaccaaacacacataaacacccataccaccacacccactaccacaaactacctacacacatattaatccacacataccatatccag

SEQ ID NO: 13659 - DNA, 539 bp, Homo sapiens
ggcggccgaggtacacagccttcaacccatttcctggcatacaactcctaacatcccgagaatatccaaagtgatgcccttttctaatgttgactgatggatggaagcccatagttagcttcagaattagggctgctcaccagaaagaccaaggcatgattacagaattagaactttcagtcccatcccctgacttccggggaggggagaggagctgaaggttaagtggatgcccaatgatttaatcaatcatggctatgtaataaagtctccagaaaaaccagccctgaagtggtggctcgcgcctgtaatcccagcactttgggaggctgagggagatcaagaccatcctggccaacatggtgaaaccccgtctctactaaaaatacaaaaattagctgggcatggcggtgcgtgcctgtagttccagctgcttgggaggctgaagcaggagaatcgcccgaacctgggaggtggaggttgcagtgagccgagatcatgccactgcaccccagtctgggcaacagagcgagactcca

SEQ ID NO: 13660 - DNA, 2143 bp, Homo sapiens
  misc_feature 1, 2, 3, 4, 5, 6, 7, 8, 9, 10, 11, 12, 13, 14, 40, 2119,2120, 2121, 2122, 2123, 2124, 2125, 2126, 2127, 2128, 2129,2130, 2131, 2132, 2133, 2134, 2135, 2136, 2137, 2138, 2139,2140, 2141, 2142, 2143: n = A,T,C or G
nnnnnnnnnnnnnnacttctagaattaattaacgcggggngaaactacagtgcccacgatgcaccgcgccagccccggccgacggacgagactgacccggacttaggcgttccgcctggcccggcggcgaggaaaaaaggcagttttgaagcatttagtggcaaaaggggtaggagacggctgctgaagtgtctactacattcaggggacctggaaggcttccagatatccgcaatgaacaatgaaaagaaattgtgaaagaaggcgcttccctcaagccggaactaatgaactcctgggtcacgtggtgcgcacgcgccaaaggcacacgataaaggaaaacgcgggcttatcgtggcctttaaaatccggcttggtgagcttgggtcgcctctgaaggagaaccattttccatctctttcatagttttttcccccagtcagcgtggtagcggtattctccgcggcagtgacagtaattgtttttgtctctttagccaagacttccgccctcgatcaagatggtggttggacggccttcctaacctttacggggcctggcggtgctgacgcctgagctggtaggggtggagcaggtaggaaacagcaaatgcagaagctgctgcgcgggagtcggccatggactggaaagaagttcttcgtcggcgcctagcgacgcccaacacctgtccaaacaaaaaaaaaagtgaacaagaattaaaagatgaagaaatggatttatttacaaaatattactccgaatggaaaggaggtagaaaaaacacaaatgaattctataagaccattccccggttttattataggctgcctgctgaagatgaagtcttactacagaaattaagagaggaatcaagagctgtctttctacaaagaaaaagcagagaactgttagataatgaagaattacagaacttatggtttttgctggacaaacaccagacaccacctatgattggagaggaagcgatgatcaattacgaaaactttttgaaggttggtgaaaaggctggagcaaagtgcaagcaatttttcacagcaaaagtctttgctaaactccttcatacagattcatatggaagaatttccatcatgcagttctttaattatgtcatgagaaaagtttggcttcatcaaacaagaataggactcagtttatatgatgtcgctgggcaggggtaccttcgggaatctgatttagaaaactacatattggaacttatccctacgttgccacaattagatggtctggaaaaatctttctactccttttatgtttgtacagcagttaggaagttcttcttctttttagatcctttaagaacaggaaagataaaaattcaagatattttagcatgcagcttcctagatgatttattggagctaagggatgaggaactgtccaaggagagtcaagaaacaaattggttttctgctccttctgccctaagagtttatggccagtacttgaatcttgataaagatcacaatggcatgctcagtaaagaagaactctcacgctatggaacagctaccatgaccaatgtcttcttagaccgtgttttccaggagtgtctcacttatgatggagaaatggactataagacctacttggactttgtccttgcattagaaaacagaaaggaacctgcagctctacaatatattttcaaactgcttgatattgagaacaaaggatacctgaatgtcttttcacttaattatttctttagggccatacaggaactaatgaaaatccatggacaagatcctgtttcatttcaagatgtcaaggatgaaatctttgacatggtaaaaccaaaggatcctttgaaaatctctcttcaggatttaatcaacagtaatcaaggagacacagtaaccaccattctaatcgatttgaatggcttctggacttacgagaacagagaggctcttgttgcaaatgacagtgaaaactctgcagaccttgatgatacatgatctctgaaagactagactgtcttatattatgagatacttgaatgctgcatgtaaagcctttaaagcaaaatcctcagaaatggtctaaataaaacacttgatatgcctagagaacacannnnnnnnnnnnnnnnnnnnnnnnn

SEQ ID NO: 13661 - DNA, 2538 bp, Homo sapiens
  misc_feature 1, 2, 3, 4, 5, 6, 7, 8, 9, 10, 11, 12, 13, 14, 15, 16, 17,18, 19, 20, 21, 22, 23, 24, 2537, 2538: n = A,T,C or G
nnnnnnnnnnnnnnnnnnnnnnnncagcttcatttccatttttggagtgtgagagttttttattcaatttgtgaaggacagttttagaacaaaatgttagtaacactcttagaacactggtttgttcatttgacattttatctgcaccaatttttattacaaaaatcaaaaaagtaaaaattcattacaatatttgcagagtataaccactagttgcctagacaaaagctaatttctacaaaatcaaaaacttaatgcagttttattaagagagtcaaaattctctcagttaactggatatacatagtggtatatatcttaaagcagaaaaccccaaaaaacaaaaacaaggaaaaaagaaaatacatgtcaacagtcagttaaatattttgacctgacagtttctacaaatagtgattttcactacatataaaggaatctgttacatgtggtaaaacttccagagaccaagtaggaagtgtggaataaaaacaataaatccaaacgcagccccaggctgggcctgttttccatgaagcccaaggcagtgatcttcatcattaaggagggaccactgtgtccacaactaaaaccttcaaccacatggtgatctgcaaagcttcattgaaaaagacaaacattctcttcttcacacaaatcactgcagaaatctttgtaaggctgtaccttgcatagggaaatagctgtgttccgtcaaattctacagaaaagagtggaagcaagctttttaaaatgatgcccatgtgcaaagagataaattaccaggcacctgatttaccaccccaatttatcttgatcatataatcttttaacaaaaagaaaaatggcaatatctggtgacagtattaaaaagacaatgttgagattggcatcagaaaaactccaaaagtgcaccttataaaaaggacacctcactgtagaaacatctatgcacttagtaagccctactcatgcacaaacaagcagttgctgggaacttgtcgaagtttactttttcagaaagttgaagtatataaaaaaagtacaagttgtgacattcgttcaagttgctgctacatgggtattctgagctggctaccaggaaggactcctgcgtttccgagagccaggtcagcgtctctaggagccgtggtgcaggtgcatggtgcccagcacggcactgtcgtaccgctcctgcaccttcacggacttggaatgctcgaccacactgttcagttctgggatgctttcagcagtgtccccaaacccgtggtagtgtccatagtacaggttatccccaatgtcttccacccaggaaggcctactggctatgcagctacttggactcccgttcaggtgcagagaaccgcacaactcagggttagctctcagggtcttctctggctcctcagtcccactaatgcagagagaaccctggctactcggaaacggctgtcctggggctaatccactgctaattccgttagttcctgtcaagcactggccattcctgctttccatcccactgagcggggtcgtggaggggaagtccaaatgtccattgatgacacatccatttgtcaatgtattcgatacggagctactgtttttcatatctgttacaacagcaaactccctatcaacgtgcattttgtcagcatcgtcttctgtgtcgccattcgtgagtggcacggcagaatccaagctttgagcttcagttctagctttctttactccaaagtcttctgagtcttccaagcatctctttcgatttgttcccacactaatatgattaggaaatacattctgatgacccccatttaagatgccattgttatagaaatggttcagatgacaattctggaggttcaagagaaactgggcacactcttggaaaccctgggtttgtgcaatgtctgctgctgtcaggccactggcatttctcaggtcgacgtgagccccattcgccacaagggcactgatgcattctaggctcccagagcgagctgccttgtgaatgggagtttcaccctcacaatccggtttgttaatgttggctcctgcttgaatcagccagaccaggcactgaggatgtcccccaaaggctgcaatgtgggctggcgtctgcgcgtaccgtgtggtggagacgttgagtgtggctcccgctctcaccaactgcactaagcactccaacttgccgaaatgcgcggcccagtgcacgggcgtccagccatagaaggagtcctcagaggccaggtgggcgtggggtgtctgctgcagcagcgagcagagcgtggccaggtccccgtcgcggcaggcgcggtgcagcgggaaacggagcgagagcagctcctcgctggagaagcccgcctctacgcccgcgcccgctcccgccgccgacatggtccgtcaccggagagcgcggggctcgctggcctagaggacgcgtcggggaggactcgagaagccgccgccgcagcacaaaggaacgagactagcgccgcggtcgcgtcccacaggctgccgagcggagcgcnn

SEQ ID NO: 13662 - DNA, 532 bp, Homo sapiens
acactgtcaggtttggggtttaacctctcacatgcctttcttaattttttttttttttttcacttttaaagttagcttaggaacgtcaattctgattctattcaatcttgttctggctcttgtagtcactcttctgaggcactcttgttctttgctgtatcaaggtcatacttaaaaagagatgttatttcttgatcagggttttgagaggattacattttcaatgtgaaggttcagccactgttttagaggactgtactaatgagcataagacagaaggtcttggcccaatgtggacccgcattcagttctattctccaaggatgacatctttaacctcagccagctatttcgcaaaagtgagtaatgggtcggctgggcatggtggctcatgcctgtaatcccaacactttgggaggctgaggtggggggattgcctgagctcaggagttcaagaccagcctgggcaacacggtgaaaccccatcactactaaaatacaaaaaattagccaggcgtggtagcgtgtgcct

SEQ ID NO: 13663 - DNA, 740 bp, Homo sapiens
aacattctgtaagggccactgtcttctccacggtgctccctttatgcgtgacctggcagctgtagcttctgtgggacttccactgctcatgcgtcaggctcagatagctgctggccgcgtacttgttgttgctttgtttggagggtgtggtggtctccactcccgccttgacggggctgctatctgccttccaggccactgtcacggctcccgggtagaagtcacttatgagacacaccagtgtggccttagccggcttgaagctcctcagaggagggcgggaacagagtgaccgagggggcagccttggactgacctaggacggtcaacttggtccctccgccgaatacccgaatgttaagttcccaggtctcacagtaataatcagcctcatcctcagactggaggttggagatggtgaggtagcggtcagccccagagctggagcctgagaagcgatcaggaactccgctccccctgttgtagcttccactatcttcaagattcatcaagtatcgagggcccttgtgtggctgctgctgatgccatgcgatggagtagatgatgtgtccactgctgagagtgcaggtgaggttgaccgaggctcccagggaggcagaggcagagggcgattgagtcagcacaagctgggagagagaccctgtgcagtggaggaggagggtgaggaagaggagtggggtccaagccatggtgcagactccccagagctctccccgcgt

SEQ ID NO: 13664 - DNA, 1141 bp, Homo sapiens
  misc_feature 1, 1141: n = A,T,C or G
ncgtttcaaaacaacacacaagtactgctccctgggggtgagggtgaggtgacggtagagatcagtgctaccctgggaaatctgacagatacagtaagatggtccctatcatagttccatttaatttgccagcctcatctgcagaatccagatggatcctggagaaaaattaaccaagtagcctctgtcgttgtcttggggtttcaccatattggccaggctggtctcaaattcctggactcaagcagtccatctgcctcagcctcccaaagtgatgggattacaggcgtgagctgctgtgcctggcagaacagtatgaagtgttaacgccaaaatttgttttagctatcatatataaatcataagcatattatttggttggttggtgttagttcattccttcaatcggatgatttaaaataaatgtttttcaagtatcctctgtgatgtatcccaaaggttagcttagaaagaaaagtacttggtgaaccattcctggtgcggagagccctgtttctgctgggcttctttggcttgggccgtttcaccatctggggtcctaaaaacaaaaaaaaggtttttttatatggttttgaaaactatgcaagaagcagcttaatacccaccatcttttcagggaaagataactgcttgtttactcttcaaaaacacccaaatgggactggccaacattagtagtgggaaacaaattgtaaaggatggggctggggagggagtacctaatcctcattttgaaaacagaaggttcaccattgtttggttctccattgttcctttgagacttagtggttgtagctctaataatgcaggattaaccaaacctacagatcaagagactttgtttttattttttgtgacagagtctccctctgtcacccaggctggagtgcagtggcatgatctcggctcactgcaacctccagcctcctgcgttcaagcgatcattgtgcctcagcctcccggggagctggaattacaggcgcataccaccacacctggctaatttttgtattttttgtagagatgggattcaccatgttgcccaagctggtctggaactcctgaccttaggtgatgcacccacctccatttcccaaagggctgggattacaggcgtgan

SEQ ID NO: 13665 - DNA, 670 bp, Homo sapiens
accattttccactgtccccagccatgagtgtaagttctggttaccctacatcttcaccagcacttggaattatcagcctttataattttgctgtaaaattattttctgctgtagaaaaaccaattaaagcaggagtgtcatcagggaaagactcttctcttcaggccttgtatcctacattttcactgcatgagaagcgcccaccagtgaaacacagggtagcaggaaacctggggtgggcagctaactaacccagcttcctaatcactgagactacttcgttacaatgtcttgccagacacagtcagcatgagtcatcctcacaactatatctaggagtctttccatcaaatgtgtgcaaatgcgggtttatggagaaatttatcttacttccttagtgttctctgttatattaaggtatatgttaaaaagttcatttataattaaaataattcttctaatttgctaataaaatgctttataccaacttcaattggtctatggactgtgataggcctaagtgtgcatcatgtcttgactacttcctatgtgacctggggacattttcttaacttccagcatccgtatctgtaaaataggtataatacccacctcttagcattactgtgaaacttaaaagagataatgaaatgcgtgtcaggcaactagt

SEQ ID NO: 13666 - DNA, 292 bp, Homo sapiens
ccgggcaggtacgcggggaagacaaatacagaatgtgaagtcctgttccaaccaagggaaatcggacacagcaataaggaatacaacatgtttaagaccacagaacatctgcataggctgtaaatttcgttgaatgatggatgcaaagatggaagacagatggatagaggaaaagacagaatcagatactggatgagttagtactgctgcctgtgcttcagagctgtcttattaccacaaggccggcaagcatcaatgtccccacatccccctctgcctccccctgaaatgt

SEQ ID NO: 13667 - DNA, 641 bp, Homo sapiens
tggcggccgacgtacatgtgcacaatgtgcatgttagttacatatgtatacatgtgcagccaggatggtcttgatctcctgacctcgtgatccacccgcgtcgccctcccaaagatctgggattacaggcatgagccaccgcgccaggccccattcttctttatacagtcattcacaagcagaagttaacattttgaaggtaaaagaaggaaaggggagtgttctgttatttcattcttcagttatgctgaaggctttttttgggatattgtcagtatatacatttatcctctttggattcttattagattctaattataacaaaggtcttggtaaatagcttgctttctttaatttagcatctttacgtctaacgttaattgaagtaggtattcaacttgtaggttgacttgaacccataaatagatgccgaaatccaaaagggtccatgttgtggactttcagattaataaggaaaacacttttctttaacgtgcagtaggcttgtcctaggattaaagccactttttgtaaaatgggcaattttacagtagcctaaataaatcaaaactttaacaatagctcccaaggtcattgagatatattaatattacaggggtcactgtaaaagctgatgtcta

SEQ ID NO: 13668 - DNA, 418 bp, Homo sapiens
acttttttttttttttttttttttttttttatttttagtagagacgggtttcaccatcttagccaggatggtctcaatctcctgacctcgtgatccgcccgcctccgcctcccaaagtgctgggattacgggcgtgagccaccgtgcccagcccagaatattattctaaaacacaatcagagcactccatacctgctaacagtttaaagccaagcacctaggcatgccatttaggcttctgaatgactgggtcttgaccaggagagctgctgtctaggttttctcctcctgactagttcctcaagagaaatgcaaaactagtgattaacagtaagagtcaggccgggcgtgggccggcctctctggtgttgctggaaatccttggtattccttgacttgtagacttgttttaaaatgt

SEQ ID NO: 13669 - DNA, 956 bp, Homo sapiens
acttttttttttttttttttttttttttagatgatcactctggtgattatgctgaggacagacttggaaggaaaagaggaagaaaagaaacagaacagtcagaagtttgtggcaagacaccaggtgagagataacagggacccgaaaaaacaaaaggcagtggagaaagagaggggaaaccagattcaaaagcaaaaaccatttctgtggtagactaagatttggtgaccaactaagtttggccccactaaaggaagggatccagtgatgagcaccatagagcagaggagctcccagggtggtactggcagggcaagggctccgttacccaggaataaactgcactgaggccacagctacaggaagtctagtttctttcaagtctcttttctttctaccattcttaacccacagtgtgccttccaaataatcaagagtcaaactacagtgtaaatcaccactattattctagttaccgctgtggcttcctagtctagtaattttttttccttcccttaaaggtgactacctacttcagtccccgtccaattgtggtcttctgaactggcagcatctgtaccacttcagagcttgttagaaatgcaaattcttaggtcccagcccacacctactgaatcagaatttctcaggtagaggcagtaattcaggtgattcttaacacacgctaaagtttgtgaagcactagctaacctcttcagatcacagctttcaatcctgtatccattttccattactctatcctaggtacactttcaagaccaaaatgtaaatttacaaatgtgtctcagtaagaaaagttacagaagctgggccgggcgcagtggctcatgcctgtaatcccagcactttgggaggccaaggtgggtggatcacaaggtcaggagttcaagaccagcctggccaagatggtgaaaccccatctctactaaaaatac

SEQ ID NO: 13670 - DNA, 2584 bp, Homo sapiens
atatcccgtgagatgttgcaacaaagccaaatttttaaagttatcaggaagaatttggtcaaaaaatgcttagaactctttactgaactggcggaagataaagagaactacaagaaattctatgagcagttctctaaaaacataaaggttggtgtaaataaccattagttttccaattggcctctttagttttttttttttttttttaattcagaaagtctttgtaaagaacatactttgtttcagcttggaatacacgaagactctcaaaatcggaagaagctttcagagctgttaaggtactacacatctgcctctggtgatgagatggtttctctcaaggactactgcaccagaatgaaggagaaccagaaacatatctattatatcacaggtaagagaacactatgttacagtcatacacgtcgttcttacaaccttgtaggctctgtgggtgtgttttctactcaggtagcactgttacaactggtattgatctaggcaagataattaacatgaactaggtcattttctgtcttaggttctgcctaggtatctggctagcaagaaaagtcagagctagatgaaaccattcttaactgttaaaaggtctaaaagtaactttgtaatacctcaggtgagaccaaggaccaggtagctaactcagcctttgtggaacgtcttcggaaacatggcttagaagtgatctatatgattgagcccattgatgagtactgtgtccaacagctgaaggaatttgaggggaagactttagtgtcagtcaccaaagaaggcctggaacttccagaggatgaagaagagaaaaagaagcaggaagagaaaaaaacaaagtttgagaacctctgcaaaatcatgaaagacatattggagaaaaaagttgaaaaggtatgtgaatacagcatttcctgatcattgatacttctaaggtgctttcaagcttagtcatacatagcccattttcgcatgttttcaacttaaaacagaaaactatgtcgtgtgtggctgggcgcggtggctcacgcctacaatcccagcactttgggaggctgaggcagcggatcacaaggtcaggagatcgagaccatcctggctaacacggtgaaactcagtctctactaaaaatagaaaaaaataaaccaggcgtggtggcacggcctgtaatcctagccacttgggaggctgaggcaggagaatcgcctgaacccaggaggcggaggttgcagtgagccaagatcgcaccactgcactccagcctgggtgatggagcgagactctatctcaaaaaaaaaaaaaattgtgcatgtaaaacatgaaattataacctgtgctctttggatacctaatgcgacatttaagttgtatttgacagtagatagtattttggatctattgaaatttgggttctacagatttcatttcacaatgaaagtttaggaattaatctttctaggttcctagtcatcactttttgattacaggtggttgtgtcaaaccgattggtgacatctccatgctgtattgtcacaagcacatatggctggacagcaaacatggagagaatcatgaaagctcaagccctaagagacaactcaacaatgggttacatggcagcaaagaaacacctggagataaaccctgaccattccattattgagaccttaaggcaaaaggcagaggctgataagaacgacaagtctgtgaaggatctggtcatcttgctttatgaaactgcgctcctgtcttctggcttcagtctggaagatccccagacacatgctaacaggatctacaggatgatcaaacttggtctgggtattgatgaagatgaccctactgctgatgataccagtgctgctgtaactgaagaaatgccaccccttgaaggagatgacgacacatcacgcatggaagaagtagactaatctctggctgagggatgacttacctgttcagtactctacaattcctctgataatatattttcaaggatgtttttctttatttttgttaatattactaagtgatgctgtgataccttaggcactaaagcagagctagtaatgctttttgagtttcatgttggtttattttcacagattggggtaacgtgcactgtaagacgtatgtaacatgatgttaactttgtgtggtctaaagtgtttagctgtcaagccggatgcctaagtagaccaaatcttgttattgaagtgttctgagctgtatcttgatgtttagaaaagtattcgttacatcttgtaggatctactttttgaacttttcattccctgtagttgacaattctgcatgtactagtcctctagaaataggttaaactgaagcaacttgatggaaggatctctccacagggcttgttttccaaagaaaagtattgtttggaggagcaaagttaaaagcctacctaagcatatcgtaaagctgttcaaaaataactcagacccagttttgtggatggaaatgtagtgctcgagtcccattttgcttaaagttgtaacaaatacaaatgagttaaaagaaaaaaaaaaaaaaaaaaaaaaaaaaaaaa

SEQ ID NO: 13671 - DNA, 611 bp, Homo sapiens
  misc_feature 609, 610, 611: n = A,T,C or G
accttcactcattccactgcctgtgactgacagaagggaggcaaagtaactcctcggcagcatctgcctttctcagcagcagactggttgttttcttctgctggtcagagcaattcttcaacaactgcatgagcagaggcatgaacatctgtcgtaaaatggggatacctgtgtcttaggcttggctgtaatctgcttgataaaaggaatgagttcctgagggtctcttccttcatagtctttgagcacatgtctgagcagacaagaggaacagaaggacttcttcctccaggcaagtaatcatgcaatgaggaagaacatgggacctctgcttctgagcatatccttctgtaaggcacagctgagggctgatgagaatatctgtaaacagttcagagcctctgaacagccacgccattccccagtctgctcgctgctctggcaagtccagcaccatggttgaagcagtctgttatagatgcctgcctttcttcccctgcggtcagcatcagtgttcctaacaaaaatttaaacttttccatcagtggagtctacagattcctcaattaatgcttgcttcctttttgatgggtgtttactgtcaataannn

SEQ ID NO: 13672 - DNA, 1629 bp, Homo sapiens
acgcggggctcataatagaattctcatgagatctggttgtttgaaagtgtgtatcacctccaccttctctctctctctccctctccctctcctgccagccaagtgaagacatgcttacttccccttcaccttccttcatgatgttaccattggaatgacatactgcatcctatagttataccatccactctgaaatcaatgtgactttaacttcagttccatacagaaacttcttttccacaggtaagaaacggttgaactggatgcaatttttatcacagcttgtgtaagactgcctctgtccctcctctcacatgccattggttaaccagcagacagtgtgctcgggggcgttgccagctcattgctcttatagcctgtgagggaggaagaaacatttgctaaccaggccagtgacagaaatggattcgaaatatcagtgtgtgaagctgaatgatggtcacttcatgcctgtcctgggatttggcacctatgcgcctgcagaggttcctaaaagtaaagctttagaggccaccaaattggcaattgaagctggcttccgccatattgattctgctcatttatacaataatgaggagcaggttggactggccatccgaagcaagattgcagatggcagtgtgaagagagaagacatattctacacttcaaagctttggtgcaattcccatcgaccagagttggtccgaccagccttggaaaggtcactgaaaaatcttcaattggattatgttgacctctaccttattcattttccagtgtctgtaaagccaggtgaggaagtgatcccaaaagatgaaaatggaaaaatactatttgacacagtggatctctgtgccacgtgggaggccgtggagaagtgtaaagatgcaggattggccaagtccatcggggtgtccaacttcaaccgcaggcagctggagatgatcctcaacaagccagggctcaagtacaagcctgtctgcaaccaggtggaatgtcatccttacttcaaccagagaaaactgctggatttctgcaagtcaaaagacattgttctggttgcctatagtgctctgggatcccaccgagaagaaccatgggtggacccgaactccccggtgctcttggaggacccagtcctttgtgccttggcaaaaaagcacaagcgaaccccagccctgattgccctgcgctaccagctacagcgtggggttgtggtcctggccaagagctacaatgagcagcgcatcagacagaacgtgcaggtgtttgaattccagttgacttcagaggagatgaaagccatagatggcctaaacagaaatgtgcgatatttgacccttgatatttttgctggcccccctaattatccattttctgatgaatattaacatggagggcattgcatgaggtctaccagaaggccctgcgtgtggatggtgacacagaggatggctctatgctggtgactggacacatcgcctctggttaaatctctcctgcttggtgatttcagcaagctacagcaaagcccattggccagaaaggaaagacaataattttgttttttcattttgaaaaaattaaatgctctctcctaaagattcttcacctaaaaaaaaaaaa

SEQ ID NO: 13673 - DNA, 982 bp, Homo sapiens
  misc_feature 981, 982: n = A,T,C or G
tccaccgcggtggcggccgaggtacgcggggtgacttccgcagtgcacgctgcgcctgccgggcattttttcctggtttgggggcaaggtctcatgggaaaggtcatgtctctcgaagaaaggttataaaccctgagatatgagggttgggcgagacatccgagcctgtttcgttccgtgttgggaccaggaataaccctgacttctgagctttcataaccccaggatcctccagaaaatttgcggcgcgctgagggaaaaccttgctgaagctgtacattggaatgcgtttacagtcattgtaatggaagcaaaatacatgaaggaaaaactgttatttgtatccctgcttattgcacctgacgactagttgcagatggttttgtttacctaagaaaacttgtgatataaatgaaaaaaacacctgttttcctagagtcattggttacaaatatgcttcgtctaagagctatttgtccattctcctggagagtgtttcaatttcgacccatcagttgtgaaccactaattattcagatgaataagtgtacagatgaggagcaaatgtttggttttattgaaagaaacaaagccatactttcagaaaagcaagtgggatgtgcatttgatatgctttggaagcttcaaaagcagaagaccagcctgttaaaaaatgctgagtatgtcagagaccatcctcaatttctttactcttcataatttagctacaaataaattcaaatttatgaatgacgattcctggtgcatgtggttatacgtcacacaacagttggctatttaaactggtctcagaatttcctcttgcgtagcagatcagcttggttttagtcataagggcaaatagcctgtttgtctggaactgggaccccccgggttagtcctgttggctgagggcaccttcttttaatcgactttcccctgtggcaccggatctttggcccattttcggggggaacacann

SEQ ID NO: 13674 - DNA, 2719 bp, Homo sapiens
  misc_feature 1, 2710, 2711, 2712, 2713, 2714, 2715, 2716, 2717, 2718,2719: n = A,T,C or G
nccgcccgggcaggtacgcggggaatcataaatactgctctaagaaagggacagaagctcagaggctggagagcagagcaccaagatcgttctggcaggaacagccagtgggaggttccagctgagcgctccccagaggtgagctgatccccagccacagcacacaggaccaggctgcgagaacagcatcatcagcatcatgctattacaatcccaaaccatgggggtttctcacagctttacaccaaagggcatcactatccctcaaagagagaaacctggacacatgtaccaaaacgaagattacctgcagaacgggctgccaacagaaaccaccgttcttgggactgtccagatcctgtgttgcctgttgatttcaagtctgggggccatcttggtttttgctccctacccctcccacttcaatccagcaatttccaccactttgatgtctgggtacccatttttaggagctctgtgttttggcattactggatccctctcaattatctctggaaaacaatcaactaagccctttgacctgagcagcttgacctcaaatgcagtgagttctgttactgcaggagcaggcctcttcctccttgctgacagcatggtagccctgaggactgcctctcaacattgtggctcagaaatggattatctatcctcattgccttattcggagtactattatccaatatatgaaatcaaagattgtctcctgaccagtgtcagtttaacaggtgtcctagtggtgatgctcatcttcactgtgctggagctcttattagctgcatacagttctgtcttttggtggaaacagctctactccaacaaccctgggagttcattttcctcgacccagtcacaagatcatatccaacaggtcaaaaagagttcttcacggtcttggatataagtaactcttggcctcagaggaaggaaaagcaactcaacactcatggtcaagtgtgattagactttcctgaaatctctgccattttagatactgtgaaacaaactaaaaaaaaaaaagcttttgttttgtatttgtttactatgagtcgttatttaatttctcttgaaaataatttcctcaaagcccaagtcagtaaaatgttatcagccagtcttccaaaatggtcataaactttataaactgctttgggtaaactgagcagaaggtgatacacagaagggaaaatgtgcactcatgctagtgtgaatttggtaagtcgcgtgactctgcaggctgtttctgtattattttcacactcatattgcttaaatattacatattagggattgtaagaaaactttaattaaaaattaaagactatatataattaaactactctgccctggacactctctgagaaacagatctactgggccctttttcatgagccattaggtggaagacagcaaagagatcttctcaagtgcttaggattacctctcaacacacagcaagcatgtccctgcctcccatgaatcttaccatgtaaatccaaatctctgcaatcctgtggcaccaaccagtggtgctcattctattgtttaaaaatggccttcttggctgggcgcggtggctcactcctgtaatcccagcactttggtaggccgaggtggacggatcacccgaggtcaggagtttgagaccagcctggccaacaaggtgaaaccctgtctctactaaaaatacaaaaaattagccaggcatggtggtgcgcacctgtagttccagctacttgggaggctgaggcagaagaatcacttgaacccgggaaggggaggttgcagtgagcggagactgcaccactgcattccagcccggcctacaagaacaaaactccatctcaaaaaaaaaaaagagtttgtataaatgggctccttctggaggacactctggtcatctgggatcagctggtgtctactgggaagcagaccagttagagaattgcttaatatgaagctagttggttttagaaatcacatagcccaacccctcatgaaagaaccacggcttggataaaattacatagaaaatgaatgacacagactattgggctgagaatgagaacgcgtatcccctcacttttatcgggaacacagctacctgcctcccgagagagtctccctagccaagtttccttgttaatgtgatgagactttactagaatgtctctgtcctgtttatgcttccctgtgctcttccttacatccccttagctcttgatgttataattttaaaatattttcatttcccctaaaggctacaacaacaaaagaaatgtttatagaatttggatgaattatgatttaactatgatcctatttaaaatagtaaaataattagcagactggagaattgcattatttttaattaatattgctgcaattacatattatggcaaagttggaagaactagtactacacaaaacttggggaaaaggtattatgagttatcttttttaatctccgaaatcaaagtttaaaaattctaaccaattatgtattttctagagttcattttcctcgacccagtcacaagatcatatccaacaggtcaaaaagagttcttcacggtcttggatataagtaactcttggcctcagaggaaggaaaagcaactcaacactcatggtcaagtgtgattagactttcctgaaatctctgccattttagatactgtgaaacaaactnnnnnnnnnn

SEQ ID NO: 13675 - DNA, 1925 bp, Homo sapiens
  misc_feature 623, 1916, 1917, 1918, 1919, 1920, 1921, 1922, 1923, 1924,1925: n = A,T,C or G
gcacgagggggaaggagagcagctcttgggacctcccaatccagaaggagataacccagaaagcatcaccagtgtgtttattaccaaggtcctggaccccgagaagcaggcggacatgctggactcgctgcggatctacctgctgcagtacgccacgctgctggtggagcacgccccccaccacatccatgacaacaacaagaaccgcaacagcaagctgcgccgcctcatgaccttcgcctggccctgcctgctctccaaggcctgcgtggacccagcctgcaagtacagcggacacttgctcctggcgcacattatcgccaaattcgccatacacaagaagatcgtcctgcaggtttttcatagtctcctcaaggctcacgcaatggaagctcgagcgatcgtcagacaggcgatggccattctgaccccggcggtgccggccaggatggaggacgggcaccagatgctgacccactggacccggaagatcattgtggaggaggggcacaccgtcccgcagctggtccacattctgcacctgatagtgcaacacttcaaggtgtactacccggtaccgcaccacttggtgcagcacatggtgagcgccatgcagaggctgngcttcacgcccagtgtcaccatcgagcagaggcggctggccgtggacctgtctgaagtcgtcatcaagtgggagctgcagaggatcaaggaccagcagccggattcagatatggacccaaattccagtggagaaggagtcaattctgtctcatcctccattaagagaggcctgtccgtggattctgcccaggaagtgaaacgctttaggacggccaccggagccatcagtgcagtctttgggaggagccagtcactacctggagcagactctctcctcgccaagcccattgacaagcagcacacagacactgtggtgaacttccttatccgcgtggcctgtcaggttaatgacaacaccaacacagcggggtcccctggggaggtgctctctcgccggtgtgtgaaccttctgaagactgcgttgcggccagacatgtggcccaagtccgaactcaagctgcagtggttcgacaagctgctgatgactgtggagcagccacaccaagtgaactatgggaatatctgcacgggcctagaagtgctgagcttcctgctaactgtcctccagtccccagccatcctcagtagcttcaaccctctgcagcgtggaactgccgtctgcatgacatgtggaaacaccaaggtgttgcgagccgtccacagctttctctcgcgcctgatgagcattttcccaacagagccgagtatgtgacttttcccaccggtgcttttctttcaaagtggacggtgggcgcggagcttgctatgagagcgcttgtcctccagttattgtgtcgagcgctttgttatcactttcctttctacttgcaaactttcttttaaaaacagacatggaaacatagaatgggccgggtgtggtggctcacgcctgtaatcccagcactttgggaggccgaggcgggcagatcacctgaggtcaggaattcaagaccagcctgaccaacgtggagaaaccccatctctactaaaaatacaaatttagctgggtgtggtggcacgcacctgtaatcccagctactcgggaggctgaggcaggagaatcgcttgaacccaggaggccagaggttgcggtgagccgagatcgtgccattgcaatccagcctgggcaacaagagcaaaactccatctcaaaaaaagcatagaatggcagctctcactgaatgttgtctgctttggaaattcagttcttcatcagttgaatattatttttttaagctactaaagagaagcattaaaagtattcaaatgttgaacatttggcaggatcaaannnnnnnnnn

SEQ ID NO: 13676 - DNA, 891 bp, Homo sapiens
  misc_feature 1, 888, 889, 890, 891: n = A,T,C or G
ncgaccacgcgtccgctgcaagccaccaagtcttcatttttcagggtttgtaatcttcccaaagttttcctttgaaaataggataatgggtggaattttcagagtgattacatacctcaacatttttattaacatacaacaatgggaaagttcatcatccatatactgcagtcacttaaacaacagccaattattgcaagattagaattggagatcttgtcctcaaaagtataaattgtcctttgagttatagaaaataatggaattgggatttctacatatcattattatacctattttaaatttaatggcagccaggcatggttccagctacttgggaggctgaggcaggaggatcgcttgagcccaggagttcaaggctgcagtgagctatgattgcaccactgtattccagcctgcacgatagagttagaccctgtatcttaaaaaaaaaaaaattaatggctggtatatagtaaacttaattcactgttcccattgtttgttctaaaaaatttttttaaataatgtttcattaaaatcttatgatttaaccgtgcttgccctttttgccagctatgtggcagtttacggcaaaactgctgtcagtgtgctggtagccctctattcatccctcctcagagcccagcttccagaactgctatcactgtgctggtagccctctgtattcatccctcttcagagctcagcttctggttgtattctccatgagtttaataatgacatgaaaaaatgtggaagccgagagagtaaaatactttgccctgtaaaaacatgtaagacatgccacacgagaaacatactttggcttgtttgaaaattcctcaaacccttgctggacaacaaaacccattgtctttgtgccgnnnn

SEQ ID NO: 13677 - DNA, 430 bp, Homo sapiens
  misc_feature 429, 430: n = A,T,C or G
actttttttttttttttttttttttttttttatagagaacaattttggaaaaagagagtgtctctttttagagcagagggcaggtttgtttgctgcccagtataattaagataatgtttccctccaaggcaaagtttagataggtttgcttgcagctccccgataatttattaaggtttcctatgctcagggtccctcagcagtgatactaacccactgcacgtgcagctttcacccgggcttccacacatcacatccatgagacttgtaggggcatgaacggtattaacacgaagttcatgctgcctgttgccctatgagtaattaagtatttttactttgacccagaagtctttatgtcttttgcccggcatccataaaaccggggccggtttactttaaaacttttttcaacaaaaataggatgcnn

SEQ ID NO: 13678 - DNA, 3639 bp, Homo sapiens
  misc_feature 1, 2, 3, 4, 5, 6, 7, 8, 9, 10, 11, 12, 13, 14, 15, 16, 17,18, 19, 20, 21, 22, 3635, 3636, 3637, 3638, 3639: n = A,T,C or G
nnnnnnnnnnnnnnnnnnnnnnccaaataaacttgtcaccctgcatgcccttggcaaataagtgaagcagaaataggaacacagtccacattcaagttgaggaacagtgtatctttaagagctgacctttgggtgacctggaaagggggaaagatggctaagcatggagagaaacgaggcaagagacaagctatgatacaacaccgcttcagcccctgccctcaatagcacacaacccacatatcagctttctgaagagaaggaacctactgtttagtgctcctcactttgcaatgtttgtgctacgccagaatttctccagtttttttcattatcatccccctgagaaaaaaattacattgaatttaaattttccctaataagagaaattaaatatgaaagaataggattttgttgggtaagattgagctttggaaggtcacgaaccattattctatctaaggtgtgtgttttgttttgtttttttttgttttttttttgcaatccctctccccctgaaccaatttcacattgggaatgcaggacctagactgctgaataaaaagctacttcttctataattgtcaggttctctccaatttctcagcttcctcaaagacatggggtggagttgggtgtgccatcactgagagagctctggaacttttgactcttagtgacatttttagatttaggggttcatggccttccacatgttgccaccaactggtgatctctgccccttcatgctgatcaagaaagtagaaactcctcgtcgccttcaggtttgcagtcgcagaaacattgcctgctgtggactgtcagcacaaaactgggacactggtgtcatttagactgtcagcagtgcacatgattgtacgatagactccaggcaaccatgtgcatctgtgcaagatgacctctgccccaagagaagggttacggtctaattaaatgtttaccaagatggtaccagtgggctctccccgtgtcctttggtgttattggagctggtgtatgacagactcaaggaaattttttaaggaaaatgaagaagaaatcaacctttatggttctctttcattggaagaggagaataaggaaagaaatggcaggtagagagggagggggaaaggaatagaaatggcatgtctttgatgctgtggcttgtgtggggacaatgggaagagcacagcaggcacaacatatctgtgttagtgccacgtggtatctgttaagtatggccagagcctcacatataagtgaagagagttaagacaattcttgctctttgaacaataatagtctatagaatttctattggcaaaccatcccagacaacctgacctatcaaacaaaagcaaataatccctgtctcagaactgctggtctaaaagctagaaggggcatgataatggaaattgctagaaaagagagaatgctctactctctttcctgtgcctacctacccccatcctaaaccctgtaaaacagaatttcaaaatagatgtcaaatatgaagtaattcagacttccaaagaaggaaagagttctgcccagggcagtatgagcaaatccacagggatgttaagatttggtccaactcaaaggtttatgggcagtgagcctagagtctcttgagagtaaacccttgcatttgggacaaggagaatatgtgaagttcaggagtgctcacactagagcaagatccagaaaaaaaaaaatccaatggcattttaaactagattgcattatcactcaatgctgttactttgagcagacaaatcagttgaatgggagggcaaatggcagaaatgaacaaaagctattaggtgaaagcatccccaatgtatcagttgtgagatgatttttgtttaatgatgatcaggtttacattgaagtggcttggaagacgtatttcagagggactgggtttgtactgcaaaactctgaacactagagcaggttctactagcacttgggcagtaaggtagcgggtgtgtattatgctattgccatagttctcgtctttgtggattcacataccctttcccatgaggagcttgctactaacagcctcctgtttctgttgtttttatatgggagaagagaaagagcttggaatttcaattgtctaaacaattggtatgatttacaagaaggcaaaccattcaggagatgttcaacagtgtatcattcttagcattcaatacaatgtttattataaaatatacacctgagtttatgtttttctgccaggctgaagggcaataatgtcttgctatgcaaacactctattttatgtgtgaatttttttaactgtaattttatgtgtgaatttttttaactaaactctatcatcattttctatgttgacatcttttttttttttttaatctgtttccaactctgagtctgtgaactatctcttctgactggatgctggcctaaaagcctattagtgcttagatatatcttgggtccttgatggcttcaacaaacaaggtcataatttgtttaaattcagtgttttctgtagataccttcttctcagtttcattaagaagagtaaccatctttggttttccaaagaatggaaactcctaccctagactttagacttagagcgtctgcctttcacgatgagtaagagatccagaatgtttaggggatgtgcgtcagcccacctggtacagtggcaaagctgaatgcgaacttgaggcctcctgaggcctgaccttctatgcccccagccctccaccccaagcaccttttggtgtggctggaaacacatgacattggatgtgatttttctcaagcccttcactgtggaaggcatgggagactgcccagcattgggcatgtggctgttaacgtttccatttcaagtccctgattcttactggagaagttaaggagccacttaatgttttcacagacctctgattctgttgtgaatgtggcattccagtgagtacaacctgcttgctataaagaaagcagcatattttgacaattttatttcttccttgggtacttacatttttattacaaaaatggccgttataaaaaaagacagaagggctgggcagtggcttgctccctagaaactgagattccgaagcaggtgtttcctctcccctagactcagaggtacatttaatccatcttctccatttcctccttcaggaccagctatgagattcagtgcatttctagcccagcggatgttcattctccactaaacttcatcttttactaagcaaagggggattattccatgaggcagccaggagcaaggggccatgatattcatgactttgtctgctgggcatttttcaaagtgtccttgaattcactcagcaaacaaagctttctggagaatctctcaaaacttaggccctgctccatttggccaaaaatgatggctgctccaaaactctgaacttcttaaatccatctggtacattatttctggggtaacaacctgtctgcttctgtaagcgcgtagactggtggcataccgagccagtcgtggggaagcccccgttctactgggactgggcgctttcacggcacacggggggtaacgccgagacgcctcaccagaggggggacagcagcacagtatggcnnnnn

SEQ ID NO: 13679 - DNA, 581 bp, Homo sapiens
ggagtcgacccacgcgtccgcgcatgcgcctaaagctgacgggtttgaaatggcttcgatgttagccgggacccgactcagatcgatgctatagaagacaaacaagggaaggttttttttccttttgcatcatggctcaatttggaggacagaagaatccgccatgggctactcagtttacagccactgcagtatcacagccagctgcactgggtgttcaacagccatcactccttggagcatctcctaccatttatacacagcaaactgcattggcagcagcaggccttaccacacaaactccagcaaactatcagttaacacaaactgctgcattgcagcaacaagccgcagctgcagcagctgcattacaacagttacagcaaccccagcaaaccctcttaacacagccagctgttgcactgcctacaagccttagcctgtctactcctcagccaacagcacaaataactgtgtcatatacaacaccagggcccggcctgcagcaaacccagtctcagaagcagcgtgatttcacaggggtggttacaaaactacatgatacatttggatttgtggat

SEQ ID NO: 13680 - DNA, 290 bp, Homo sapiens
  misc_feature 1, 283, 284, 285, 286, 287, 288, 289, 290: n = A,T,C or G
nccacggcggtggcgggcaacgtactgtgcttcacaaacgtcgtcatggcttggtgcgggaatgattaatagagtgagcgcgctcaagtgatacttgatgcttgatccagagtcggttgcttacagagggtacgggtgctagatggctttaagaacgaagccgggtaccttcacagtgtgtgttacagctgtttaagaagttccgtctgcagtctgtaactacagatatgtctggactatgtacatatacaagcttactcaacaaagccaaccgcccctaaannnnnnnn

SEQ ID NO: 13681 - DNA, 672 bp, Homo sapiens
agatgtagtcttcacagtgagttgttatttgtagctgtgtttttgtttttgtatagcttatagcaatgcagtgtgctttttattaacatcattttcttttctttttgcagtgattatttattcaagttacttctgattggcgactcaggggttggaaagtcttgccttcttcttaggtttgcagtaagttgaaattgaaatgtctttacaattaatggtacaattaatgctatgtatgttttctaggtagataaaattaaacagttttattcagaataagttaattcttccagaatttatatatttaaagactccaaatatacatccccagtggtatcttggactgttaaatagaaaaatattgttgctcttaaaagaaattcagtgaagtctggttataaagtcagaatgtctaatacttttggccagagtcaaacagcagttccaatataggcagcaagttaaaggggtagttggtggcctgtgttgaaagcgacttgatgaaaataaatctttaaattaaactttagtagagcaaaaaaaaaaagcagagccgggtgacgcagtggatcatgcctgcagtctcagctactcggggtgctgagggtggaaggatcacttgagtctaggagttttgagaccaacctggacaacatagcatgactctgtctc

SEQ ID NO: 13682 - DNA, 639 bp, Homo sapiens
  misc_feature 1, 2: n = A,T,C or G
nngcgagatccctatattttacttttcttatagagttttttttccattcttggctagattcgtttttttttaacaaaaccccaggggttattcatcttttagtttctcccaaaattgaaaacatcaagtcctactgctaaggggaaaaaccaaacaaacataaaatccgggacccctccccccttcttctcttaaagtcacagagcacggaaggaactgcagtgggacaggtgggtgcagagaaccagaaggggaggatggcaagataaactccccaaatgcttgaaaagctgttcaacagaaactgtgataaatacaggacaatgcaagacaaagttaaaataaggagcagcagtgccgagaggctgtgttgtagatatggcctcccttcctcttctcttttctcatcagggtattctaggcccaaggcatgacttgtcccttccagatataaatgttgactcctttccgccaattgctgtacagtctcttcactcgccgataataagcgtctttgtccagagtcacagccatagccccggacgccgcttctcctcgggttccgagaatcacgcgaggtcccggctcagccacccgctctcggcccaagaatcccgcactctccccgcgtacctgccc

SEQ ID NO: 13683 - DNA, 184 bp, Homo sapiens
  misc_feature 1, 2, 184: n = A,T,C or G
nntacgcggggaggtacaaatagccctgggctctgcagctccacaggctcctggggtggagtccaaatcactcattgtttgtgaaagctgagctcacagcaaaacaagcccaccatgaagctgtcggtgtgtctcctgctggtcacgctggccctctgctgctaccaggccaatgccgagttcn

SEQ ID NO: 13684 - DNA, 720 bp, Homo sapiens
  misc_feature 1, 2, 3, 4, 5, 6, 7, 8, 9, 10, 11, 12, 13: n = A,T,C or G
nnnnnnnnnnnnncggaagtcttctagaattaattaacgcgggttcctgaaagtctttcgtagatattaatttccctctcccagtaggattagctattgcgtttacccctagtattaagatgagtgtaaggtacctagcttgctcccaaaggcagggtagagatgagccaatctgagataatgcatctgatattttttcccaggattgatagcaaatctagtaatgtgaagatttcatttcttggaggcctggcctacaaagtcatttatattgaactcttaaaataataattcttaattctataagagctcagatttactcatatcagttgtagtaagaatagtgtcaccgtgacataaaaatgcctcatacttttatatgcatgttcaacaactctgtagcctgaacagtgggaacactggagaactatgtatactcacaagtaatattttacttaaagaaatactgacttgaggtgcttcagataagatattttcaattttgcttccctcactccatccctgagccgtttcttcatttgtttgctcatttgttcatgcttcattaagtgccgacacattgccagcacagttctgggtgctggggatgagacacagcttgagcccccaaggaagtcacagtacaaagggagagatcagaacaacgaaaaacaagtcaacaacacttgtagaatttggttctataaacaacatttaagc

SEQ ID NO: 13685 - DNA, 242 bp, Homo sapiens
  misc_feature 242: n = A,T,C or G
accttaagtatcagctcagccacagtggggtagagcaccaagcgagctcttggagtccccaattcaaggccttggctcttggatggcatttctggatttgcacttgaccacaggcaagtccactgccctgaaggatgtgtcctaggcctggcagaacttactataaactgtctgaggagcccttgggccttaagtgaacatcggcagtagcctggcaatactctctgtgggcctgtggtagn

SEQ ID NO: 13686 - DNA, 423 bp, Homo sapiens
  misc_feature 1, 2, 3, 4, 5, 422, 423: n = A,T,C or G
nnnnnactgattaattactgcagtaacctggcaaagagatctctcaaaagccctgcagcatcaaggtttttatgaatggcttagatgaggtggatacagcattcctgacttgtcgagtcttagaaacacaaagctactgctacaagagtggccatggggtcccaaaagagtctttacacacattacaaaaggctaaatctaaaaggattcaacataataaggtaagtggaagttccgcctggaactcccagaaatttagttgctcacaaaaaagccaaaggccaattcagtcttaatctgatacactagaagcacagggtcaaaacaggatgatcttccctgtcgcttatcccccgactacacctgcagaaatgtgtccattcaagagcatactcttttagagggacaatctattttcagcnn

SEQ ID NO: 13687 - DNA, 465 bp, Homo sapiens
  misc_feature 465: n = A,T,C or G
actggaaaaccacaggcaagtagaaactggagcaggtccccaggataccacagcagccctatggaaaagtggctagacggttatgtgggttcctgttcccatatctcctcactgggaaggtccttcaggcctggacctccagccacccactgccagagctattaaactagtaacaacttgacaactccctgggcagagcttccaggggcaactgaaaacctctctgccactgcctctgcagtagaactgtctttgctaccctcagactaacaaaagaacaaagaccccacgtgctttatccacacttacaacaggctgcaatcaacccaaggagaagaagccagtccctctcccatgtgctccacacaccctccactgctcatcatcagacagggacccctggcttgggcccacagcacagaccctccatcctaggctgattggaccaaacaattgctgacctgn

SEQ ID NO: 13688 - DNA, 379 bp, Homo sapiens
  misc_feature 1, 2, 3, 4, 378, 379: n = A,T,C or G
nnnnactttttttttctttttttttttttttactcggggatttactatagtttaaagtttcctttatctaaccaacatatagaaaacacagcattgtggactttaagtggaaccctacatcccccccaagttcagaaaattaaagcaaaacaattgtttctgcaagaatggagaattcaaatgttagacaaacattggttttgttaaaaatgccactgtattttgttttgtttttaaaatgatcacggctaccatacactggataatttggtcagcataaatagctctgggaaaaaaaaatattacatgagcctgttataatcaaggagattagtaaaaaaaaatgattttgccttatttaatcacaatgatgatgann

SEQ ID NO: 13689 - DNA, 455 bp, Homo sapiens
  misc_feature 455: n = A,T,C or G
acccatataaatcccaaacccccagctccaaaaggagatgaatagaagagcagaagaatgcagagtggcaaggcaaagaatgggagaagagaaggagcatctgaaagttgagaggagttgggctggggacggtccgagaggagattggccgctggatggccaaattccaggagaaaaataatctcactccatcccccttccagctgcccatccaccctgctgagagccacttccatcactcaataaaacccccacattcatcctttaagtctgtgcgacttgacttcctggataccagaaaattacctgggtcccaagagggcaccgagctggttacactcttcagctgtcttcagatggcaaatctaaaagagcacactgtaacacacacccacttgggcttcaggagtcacaggcacccacccttagatcctaccttggggctggagccccan

SEQ ID NO: 13690 - DNA, 1082 bp, Homo sapiens
  misc_feature 1, 2, 3, 4, 5, 6, 7, 1075, 1076, 1077, 1078, 1079, 1080,1081, 1082: n = A,T,C or G
nnnnnnnatcatccttcaacttggcactttgacaggccattagggggagtcctttgggccccatctgaacctctctcattccaggagtctgaggatctggccagccgcctttagtattccaggcagtgtgtgggagagttggagcaggctctctgctgtctccacacagcagaagaaagcagacagggtgagtccaaccgcctgccccatcccctggcagcctggcttcccaggtggcggagtgagcctaaaggttccttctgcaggatggaatgtcctgcccagaaggcagcatgggccatttcttgctgcttttgtgcgtggttgttagacgtagcctggggctgagtccgcttctgtgggtgagttaggggccctgtggggagcgagcactggacatagagcttggaggccaagtgctcaccctgcccttaactggctttggcctttgccaagtgctaagtggggaatatggtacttgtactgtgaaggtacagaagagtatctttagtatgttaccatttgtgtagagagagggaacgtgtgtgtgtgtgtgtgtgtctacatacatactatgatcatatacataaaacatatctgcaaggattcataaactcaggagggtgttagtgggaaaggggcgggagagcattaggacaaatacctaatgcatgcggggcataaaacctagatgacgggttgataggtgcagcaaaccaccatggcacatgtatacctatgtaggagacgggcacattcagcacatgtatcccagaacttaaagtgaaataataaataaataaaacacaaaaaactcaggagagaggaacagggtggctgggcgatatttcccttctgtaccttctgagctttggactatgtgaatgcatcatcctttcaaagagtgaacaagaaattgatttccccattcctggctgtgcccccacccccagtgaacaaatgggcttggagaatcagatatacctggggtttcaaatcccagctctgtctgagtgatcttaggcaagcacttaacctctaatgccccatgtttttttgttgacacaatagaggnnnnnnnn

SEQ ID NO: 13691 - DNA, 469 bp, Homo sapiens
  misc_feature 462, 465, 466, 467, 468, 469: n = A,T,C or G
accacagacaggcgcaagagggaggaagaaactataaaccgaaaaagaaactgacaaacttctctaattgggaatttacatgcagagagtgagagaagatacatctccccataaaaggattgagaggctgtcagattctctggctgtgctgtttggtgaaggtcttcccctatagaaagccagtatgtaaagattgagagaggtggctatttttcaaatgcaaaaatcacaacaaaaaataacaaggcacacaaagaaacagggaaatcagtcaaagaaacaaaataaatctccattaactgactccgaagaaacagagatctattagttacctgaaaaagaatttatgataatcttaaagaagctcaatgtgttacaagagaatacagatagacagcttaatgaaatcaggcaaacaaagcatgaacagaatgaggatatgaacaaagatatagaaactanaannnnn

SEQ ID NO: 13692 - DNA, 449 bp, Homo sapiens
  misc_feature 448, 449: n = A,T,C or G
actttaccctgcacagatgccctccttgccccactcaagctccaacacctggaactgaatagtcttcctgtatagataccctccccaccctacttggactctggcatctttgtctgggtagctttttcccaaggtggtaggttgcttgataggtgcttagtaaatatcatatttgattaactttttgtagcctcctctttagtctagaaattctagatcccaaatagaaggtaagatatggtatattctggacttttagttttctatatctccttttcaaatacagacctagggtgacagacaaaaaaatattgtgatcaaagtatatagcatttcctttcatggtggaaaaatgtgcctgataaatgttttctctgcattatttgcctccaaatatattttaatgacagttatttggatatttcacactttatacttgacttgggcnn

SEQ ID NO: 13693 - DNA, 671 bp, Homo sapiens
  misc_feature 1, 2: n = A,T,C or G
nnacccacgcgtccggtagaatatgttcttaaattccttgagaacttaaaaatttgtagtactttatcatactgttaataaagagggagagataagggttatgggaaatgcacatccttttctgactcttaagtccttttctgggaatatgaaagcaaaccatatgcctatggcgtctctgctataggcttagcagataatactagggttctagataaaatgaaaagtatgaaggcaaagatttgatcatgctgttttctaaatctcaggacctttagaatgtatctctaactcactttgtggactcctttcacttgtaccttttcttccttttcttactctgcatccagatccccacctcacagtccaagatcctctctaccactcagtccagctttctggctgccacctaaacttcagtacctggcttctcttggccagatcgaaggactgtaatatgatttaagttgtgaatatgccttagtatgtgagatgtcttttcatatgagggagttcttaacctactttagcttaatcaccagatccttttgtcttttatgctaacacataaaaaacacaggcttggtattacagctttttgtcttctatgcatgagcagttttgttttgtatcccagggatcccagaagaacagctttgcttggccagggt

SEQ ID NO: 13694 - DNA, 2850 bp, Homo sapiens
agggagtcgccacgcgtccgcttttatttttcaatatcccagtaaacccatgtatattatcactatatttaataatcacagtctagagatgttcatggtaaaagtactgcctttgcacaggagcctgtttctaaagaaacccatgctgtgaaatagagacttttctactgatcatcataactctgtatctgagcagtgataccaaccacatctgaagtcaacagaagatccaagtttaaaattgcctgcggaatgtgtgcagtatctagaaaaatgaaccgtagtttttgtttttttaaatacagaagtcatgttgtttctgcactttataataaagcatggaagaaattatcttagtaggcaattgtaacactttttgaaagtaacccatttcagatttgaaatactgcaataatggttgtctttaaaaaaaaaaaagaaatgtactgttaaggtattactttttttcatgctgatgattcatatctaaattacattattatgttagctgacagtggtactgattttttaggttggttgttttgtggatttctttagtagtgatagtagcctgaaccacattttagataactcaattatgtatgtatgtgcatacacatatacaaacacactaatggtagaatgcttttttatgtgctagactattatatttagtagtatgtcattgtaactagccaatatcacagcttttgaaaaattgaaaaatcacactatattaatatttcatatttgccaacagaaacatggcagataggtatcaatatgttttcaatgcctgatgacctataagaagaaagtattgaaaagaagagagattagaactgttagaaggagttgaaacttttctaaaagacataatattgagattagaattaaatgcattctcagaagtccagggcgaataatatgaatgctatcatctcgaccaagctcaaagcctacttattagaaacaatgaacttcacaataggtcataaagtctcttccttttctaaacttgaaagacaagagatttagtgccaatattgtacagacagaaattccatgtatgagtctcaacaaagactacctttggctaaatgtctagaagcagagaagtaaagtgagcaaaatccagtgttgaggagtcatgacagtactttgatctttatatactctgaagcatttcttcaaacttttctacttttatttgtcattgatacctgtagtaagttgacaatgtggtgaaatttcaaaattatatgtaacttctactagttttactttctcccccaagtcttttttaactcatgatttttacacacacaatccagaacttattatatagcctctaagtctttattcttcacagtagataatgaaagagtcctccagtgtcttggcaaaatgttctagtatagctggatacatacagtggagttctataaactcatacctcagtggacttaaccaaaattgtgttagtctcaattcctaccacactgagggagcctcccaaataactattttcttatctgcagtattcctccagaagagctaaccagggcagggctggcatgagaagtgacatctgcgttacaaagtctatcttcctcataagtctgtaaagagcaattgaatcttctagctttagcaaacctaagccaaaggaaggaaagccacgaagaatgcagaagtcaaaccctcatgacaaagtaggcacaagtctacaataagctaaatcagaatttacaaatacaagtgtcccaggtagcattgactcccgtcattggagtgaaatggatcaaagtttgaattaaggcctatggtaaggtaacattgctttgttgtacttttgaacaagagctcctcctgatcactattacatatttttctagaaaatctaaagttcagaagagaatgtatcactgctgacttttattccaatatttggatggagtaagttttagggtagaattttgttcagtttggatttaatcttttgaaaagtaaattccttgtttactggtttgactataattctctgttatctttacgaggtaaaactgcaagctgactagcatgttctgtgaatctgccattcctaaaaattttataaacacttgatacttttcactgataatggatcgctccaataaacatatattgtgaaaatgcatccacaataaatggaattccttcctgcaaaaaaaaaaaagaagaggaaaaagaaaatcttggggggggctgggcccccggaaaagttttcaagagccaatgcgtttggggggggggcccctgggttgtgaccaggggtccatactgggtcccataaaagaaacaccgggccacggagaaggcgtgtgggcattcaactacaccaaaaataaaaacacgcgcgggggggcaacaagacggactttattgtaatacaaagccaagcagggggtcgccgagggggccagacaggggcacatcgaacagggagctcgcaggcagcacccgattcaaaattaccgccccgacctgggattgcaaaaaggaagcgataccgacgaagaggtcgatgaacaaggctcgaagtcaacggaacacgaaagcgatgcaacaagcaaatgttcgagagcaccgagcgcgacaccgcagaaaagaagtagtagctgaaagcaagagggacaaccaggaacaggcgcaaataatgagaaaaacgagtacgcagagagggaaaggagggaatagaaaaagaggattgggggaccaaaaaaagaaaacaatcgacaaatcacataacgggacggacaaaaagaacaaaagtagacaacaaagcgagagaaaaagaaaaaggcaagc

SEQ ID NO: 13695 - DNA, 1944 bp, Homo sapiens
  misc_feature 1, 2, 1929, 1930, 1931, 1932, 1933, 1934, 1935, 1936, 1937,1938, 1939, 1940, 1941, 1942, 1943, 1944: n = A,T,C or G
nncggcagagggatcagcttttggctggaacgtggaaactcacaggtgcagacgccagaagtgagatttcagcagcagctggagcagctcaactccatgggcttcatcaatcgtgaggctaacctgcaggccctgattgccacaggaggggacatcaacgcagctatcgagagactgctgggctcccagctctcctaatccctcggcccatgcctcctgcctctcccctccctcgatgtcagcattcggttcttctgtcaatccttaccctctgcagcttgtcctccaaccccttagctctgtctgagaattatggttttactgctacgtctctaacagactcttctctcctggtctccttgagcagtgctacttaaacagttttcacagtttcattgattgactctacctccttgccccacaccacttttgcaatctttaaactttcagtggctgtgcagagtcgagggaggaaccagctctctggtttactggaacatagtcttccatctataccactagggttttgtcttatgtttacttttggtaactctcttccttctttttctccctaccccccaacccctagcccaaccaatgctagaatttcttgctctgaaggaggagcaggtgaaacaggtggtaattttccttctcggcccctattctggttcattcagcactttttggtgggaactgttggaaattccagggtaaggaggaagatgcctgttctccctgtctgaagagggagatgagacagctctctggacaggaattaacaaacgctggagcagcccagaggaaattcgtgtgaaagaggagggaatgagattattcggaggaagggaatgggggagacagcctgagtaaaaggcttggaagttggaattaacagtggggagcagaagcactcatagctcttttaggcagaagaatccaggcccgagctggcagaagagacttagagatgctaatggaatttaaactgaaaaaaggagcccaatgaagctaagcgccacgccccacaaggggtcatattggctttagttcctcaagcatatgtgcttatatgcacacacacacacatttccatggacccaggtcttgcttgtgtccccaggcaccagtagtttgagcccccctcaaaagacatgaagggggttggggtctgtgtgagtagtggggaggtgcatgtgtatccacatgtgtgcatacactcttaagttgggtgggaagtggattccttgttggtttctggttcagagtgctctcccaccaccagagacaagtgggtaaaaaggtcagtccattgcaggaatatatatccgggagagctaggtcccttggggctctggatgctgggtaacccagaggtaatgtgggtaccctttctgaagctgtcagggctgtgactagcacccttatcacccctcactgccttgtgggaatagtagagggtttttttcctccagaccccctggcctttcagttcttaactatttccctccaggccagaaagttttctttgaggaaggagaggagagggtggcaatgatgcctttgatctggaattggacatttctctgtcagagcacagaggaggctcatatcacctcttccctctcctacttggcccagctgcttggaggaccgaccccatggctgagaatatgacggcaagaggaacagagtttgctccaagtgggaaagggtcccaagcagtccagagaagatgtctgtgtggctttccctccctgcctcccccagctcccacactggcctttgtaaataaatggcgtggtctttgttgtgaaaaaaaaaaaaaaaaaacaaaaaaaataaagaaaaaaaacgggggggtcggggggggagaaaagactaggggggagaaggaggccaccgaaagagagggacacgggggccaannnnnnnnnnnnnnnn

SEQ ID NO: 13696 - DNA, 406 bp, Homo sapiens
  misc_feature 405, 406: n = A,T,C or G
cctctgcagatccattgctgattaacgtgtgtggtttccctcctccgttctccctctcaggttaccacaggggctgtaagacctagtgaccctcctaagtgggaaagaggaatggagaatagtatttctgatgcatcaagaacatcagaatataaaactgagatcataatgaaggaaaattccatatccaatatgagtttactcagagacagtagaaactattcccaggaaactgtgcctaaggccagtttcggtttctctggcattagtccattagaagatgaaataaacaaagggtctaaaatctcaggcctgcaatactctatacctgacaccgagaaccagacgcttgaattacggaaagacaaaggagatggaaaagcaaaatacggataagtgtcacgnn

SEQ ID NO: 13697 - DNA, 2590 bp, Homo sapiens
  misc_feature 1, 2570, 2571, 2572, 2573, 2574, 2575, 2576, 2577, 2578,2579, 2580, 2581, 2582, 2583, 2584, 2585, 2586, 2587, 2588,2589, 2590: n = A,T,C or G
ngccgtaagaccgctctgggcacgggggcgctcacctcactggctcgggcgggtccgggagccacgagggggtagagggaaaagagctccgggccaggggctgccgtcgccgccgtcggggagtcagcccgccagcccgccagctcgtcagcccgccagccagcgcttcgcgggccctgtcggtcccggtaagcgggcctgcgcttaccggaaagaggagcgtaagatgaaagagtatcagaccaaacattgtctggcttgcactgtaaaactagttagctgaagacgacttctcaggtttcttcaggatgcctgcagcacttgtggagaatagccaggttatctgtgaagtgtgggccagtaatctagaagaagagatgaggaagatccgagaaatcgtgctcagttacagttatattgccatggacacagaatttccaggtgttgtggtgcgaccaattggtgaatttcgtagttccatagattaccaatatcagcttctgcggtgcaatgttgaccttttaaaaattatccagctgggccttacattcacaaatgagaagggagagtatccttctggaatcaatacttggcagttcaatttcaaatttaaccttacagaggacatgtactcccaggattccatagatctccttgctaactcaggactacagtttcagaagcatgaagaggaagggattgacacactgcactttgcagagctgcttatgacatcaggagtggttctctgtgacaatgtcaaatggctttcatttcatagtggctatgattttggctatatggtaaagttgcttacagattctcgtttgccagaagaggaacatgaattctttcatattctgaaccttttcttcccatccatttatgatgtgaaatacctgatgaagagctgcaaaaatcttaagggaggtcttcaggaagttgctgatcagttggatttgcagaggattggaaggcagcaccaggcaggctcagactcactgctgacaggaatggctttctttaggatgaaagagttgttttttgaggacagcattgatgatgccaagtactgtgggcggctctatggcttaggcacaggagtggcccagaagcagaatgaggatgtggactctgcccaggagaagatgagcatcctggcgattatcaacaacatgcagcagtgatggcgccaggctctgcagggtgggcctgatcccagagtggtgcttactgtgctgactgtgtacttatcttccccaagagaaaatgcttcttttgagcacactgtacctaccatctgcattgagcagaaagacttttgttttactgaagacaaaagatgtttttattttagacccagaagagaggagtttgctctgaatttgtaaataagtcttccccattcctcatactcgagcctctcctctctggttgcctcctgccaccagcatccatggctcatttgacacctttttaaatatcaggacaagtctgaaacaaagtagtaaaatgtatataactcttacctgttgtcattctttttcttttaaatttgttgctaatctctgataatgaagattcttactctgattctcagctgagctgtgagggcttccagggaaaatggaacaaaatggtgttcttaggtaatgggttgtagatactgagtcttcctttccttttctgacccttctcgaggacatttgctttcctcacacttttgtagtctctctttacatattactatatggaaatgaattgctctgtgctgaaatttgaagaccagataatgaaactgaaaagcaaacaattttactgaatctgtctacccttcattcatgagaactccagaatgagtgttgaccactgaagcatcttttaagtctgtgttccattgtgccattcaggtttgctgtcacatatgcatcatctgaaatcatttgaaatttttgtacaataaaatatcctggatttgatcctgaaggaaactagtaagatcagatttttgggtcatgtctgttgtattttcagtaatgtgatttcagatggtcatctggattctcccacttctctactccattatttctctacttttccttccagcaaacctgaaacgtgagggagatggattaatgtgagtaacaggaatgtgtctttaaaaagctagagtggttacatttaatcaggcagtaagataatttgggttcttgagttgttttggagtaatatcccacaactggggtaggaagctcaggacttttttctttaaagctagtcatttcaaaagcatattgtatttttttgaatgactacagtatggacaatttcaaaaaccaaaacccactttggattggtggaagtaaaaactggtaactcactcaagtgaatgaatggtcttgcattttaaaagcttatgggaaactcaatttgaaatgattagaaaatgtcaagtattataagctggtatttaagatgcttgtaaatactatttatgtttttaattttgtaaaataaagatttctttttaaccactggcaaaaaaaaaagggggggcctttaaatttccnnnnnnnnnnnnnnnnnnnnn

SEQ ID NO: 13698 - DNA, 280 bp, Homo sapiens
  misc_feature 280: n = A,T,C or G
tcccaaagtgctgggattacaggcatgagtcactgcgctcggccatatttatattcgacatcatctctccatgtgcaagacgtggaggaaggagtcttatggcagctaaccctgaagcctctgtgagttaaaatatcgttttgttctttcccggcagctcccctcgccacagtcctgagcaatcgtttcggacaccgtctggtagtgatgttgggggggctacttgtcagcaccgggatggtggccgcctccttctcacaagaggtttctcatatgtacn

SEQ ID NO: 13699 - DNA, 1262 bp, Homo sapiens
  misc_feature 1, 2, 3, 1104, 1252, 1253, 1254, 1255, 1256, 1257, 1258,1259, 1260, 1261, 1262: n = A,T,C or G
nnnggggaacgcacggggttttccagtcccgacgttgttaaacgacggccagtgaattgttatacgactccctataaggcgaattgggggccgggcccccccccgaggtttttttttttcccccggcttggtttttttttttttttttttttttttcagtgggaagaaacttttatttccaggacacgtgtgcagaagcaacaagtcaaaattaaccattctatctgaaagagaagaaacatgtaccaacacatgtcattcaaggagtagaagtttctagaataaggcaaaagttacagggcagcagttatgacctttaatagaactttgttacactgaaagatacagcctgccatacttgcagggaaaatgtctttcaagaagggtaacacccaatttcttccatacatttaaaaatagcctaatcttaaacttatcaaatcattttagggatgagaaaacagggtcacacaagttaggtgacatcatttatggcaaagcaagaatcggcatgtttattttctaacccccaagctgaaatattttccactgtaccactctaccctatactccaggacttcatctttcttactgaaaaacccaaaccatcaaatgtccccttgttctacccaagaattgttctgcaacatacgccacctgctttcttgctttctatgaggctgaagactagacaggcaggagtttattatacagacctgccatatacttgaagtagtgtgttaagtcaaccagaggccaagttcttgaatgctttctctgtttggattatttccacgctgtctggctgctctgccctggacaggtccctgctctgcacatctctcaaggctgagaagccccaactagggtaactgtcccatcagaaggtgagttcactgggtaatgggagcaactgctcattgtgaaggtgacatgatgttaaaaggcttgaaaggggctgcatggtggctaacgcctgtaatcccagcactttgggatgctgaggcagacggatcacctgaggtcacgagttcgagactagcctggccaacaaggtaaaactccgtctctactaaaaatacaaaaaaaaaaaaaaattaagtnttagctgggcatggtggtaggagcctgtaatcccggctacttgggaggctgaggcaagaggatcacttgaacccgggaggtggaggttgcagtgagccgagactgtgccattgcactccagccagggaacaagagtgaaactctgtcnnnnnnnnnnn

SEQ ID NO: 13700 - DNA, 717 bp, Homo sapiens
  misc_feature 1, 2: n = A,T,C or G
nnactgggtttggtttttggcctaatatatttatgctagaatattacattatggtattatttctcgcactgtagcatgaaaagacctacatctgatgaccaagtaagattttataaactatttagtctctagaagatctgatgtacccagcaattctcaaacatcaaatctcccgctaacttctcctggctcaacaatccttcaacatattgatttcaaaaggagatccagttataaaaataatttttaactcctcattcacaacatactaaaatcaaggagtggaagaatttttatttttatttgttttgggaattatgagaatatagctatttagtccataacacttcttagaggtcgtgggacttaaaatgagctttgacaaatggaagacattttctacacacagaaatttgaaatccacattccatagcaaattagtagaaaagaagtaaacaagacctctgtatttcacccaattgttttagaccatgatactaaaaaaacagacactaaaattcttgtgagtggatattccctcctcctggtgaaacttagcttgcttcactatgcgcataaaaagagaactcaacagaacattagctcaggaaaggagaatctaatgaagacactggaaagccaataaaacttcatgtttcttgtttttgttagacagcaaacagcaaatgaccttgtcctatgcaatgtcaagcactg

SEQ ID NO: 13701 - DNA, 650 bp, Homo sapiens
acacctttcccagggaaaaaaatgtcacactatatcaagaatcttttaaaacgttcacactccttaagagtgattctatttctaggaatcatttcaaaagaaaaaaaatcaaggatgtggatagtgatttatgtaaatgaatgcccatcacactgctactttaaagtgtcactgaataactgcaaatggtgtatattcccaatataaggaaaatagtaaaagaaattatggtataattatgtcattattataaacatttctacaaatcatgatactgaaaatactgaataacactaaaaaatgaacaatactgagtaagaaaggggatagaaaaatatacattatgacttggtattaatgacccaagtcttagaacccaaacatacacttgccattcacaccctcacaatttcccccaaattttatcccacagtcaatggaaagaacaccaaaagaaaagcccagagtgtgaagactgtgtcctttacttgtcctttagcttctggaattttagttcattttactttggtttagtggattttaatttttctccttgataaagtgaagcttgtctggcaattcagaagctttaggtgaaatccacccaactttaatgtggaaacaaccgtcattgggtccttcccgcgtcc

SEQ ID NO: 13702 - DNA, 249 bp, Homo sapiens
  misc_feature 245, 246, 247, 248, 249: n = A,T,C or G
acaaaactgacaaagggctcagaaacttgtgagtagtgggggcaggggcggcacaggccaggccagtatttaggaaacgtcagggttaatgtccagaatctagcaatatgtttgggaagaaaaactgagaacagttgaaggacaacttacttggggtttggagggaagagattcaaagatatcaacagatcatggtcacacatggatgacaaacaaatgtgaagacaggacaatgggtaactaannnnn

SEQ ID NO: 13703 - DNA, 6142 bp, Homo sapiens
  misc_feature 1, 2, 3, 4, 6139, 6140, 6141, 6142: n = A,T,C or G
nnnncactccttctcttcgcgccggccggatcccagtgtggtggtacgtaggaattccggggggagagctggggcgagaggtgccgttggcccccgttgcttttcctctgggaaggatggcgcacgctgggagaacggggtacgataaccgggagatagtgatgaagtacatccattataagctgtcgcagaggggctacgagtgggatgcgggagatgtgggcgccgcgcccccgggggccgcccccgcaccgggcatcttctcctcccagcccgggcacacgccccatccagccgcatcccgcgacccggtcgccaggacctcgccgctgcagaccccggctgcccccggcgccgccgcggggcctgcgctcagcccggtgccacctgtggtccacctgaccctccgccaggccggcgacgacttctcccgccgctaccgccgcgacttcgccgagatgtccagccagctgcacctgacgcccttcaccgcgcggggacgctttgccacggtggtggaggagctcttcagggacggggtgaactgggggaggattgtggccttctttgagttcggtggggtcatgtgtgtggagagcgtcaaccgggagatgtcgcccctggtggacaacatcgccctgtggatgactgagtacctgaaccggcacctgcacacctggatccaggataacggaggctgggatgcctttgtggaactgtacggccccagcatgcggcctctgtttgatttctcctggctgtctctgaagactctgctcagtttggccctggtgggagcttgcatcaccctgggtgcctatctgggccacaagtgaagtcaacatgcctgccccaaacaaatatgcaaaaggttcactaaagcagtagaaataatatgcattgtcagtgatgtaccatgaaacaaagctgcaggctgtttaagaaaaaataacacacatataaacatcacacacacagacagacacacacacacacaacaattaacagtcttcaggcaaaacgtcgaatcagctatttactgccaaagggaaatatcatttattttttacattattaagaaaaaaagatttatttatttaagacagtcccatcaaaactcctgtctttggaaatccgaccactaattgccaagcaccgcttcgtgtggctccacctggatgttctgtgcctgtaaacatagattcgctttccatgttgttggccggatcaccatctgaagagcagacggatggaaaaaggacctgatcattggggaagctggctttctggctgctggaggctggggagaaggtgttcattcacttgcatttctttgccctgggggctgtgatattaacagagggagggttcctgtggggggaagtccatgcctccctggcctgaagaagagactctttgcatatgactcacatgatgcatacctggtgggaggaaaagagttgggaacttcagatggacctagtacccactgagatttccacgccgaaggacagcgatgggaaaaatgcccttaaatcataggaaagtatttttttaagctaccaattgtgccgagaaaagcattttagcaatttatacaatatcatccagtaccttaagccctgattgtgtatattcatatattttggatacgcaccccccaactcccaatactggctctgtctgagtaagaaacagaatcctctggaacttgaggaagtgaacatttcggtgacttccgcatcaggaaggctagagttacccagagcatcaggccgccacaagtgcctgcttttaggagaccgaagtccgcagaacctgcctgtgtcccagcttggaggcctggtcctggaactgagccggggccctcactggcctcctccagggatgatcaacagggcagtgtggtctccgaatgtctggaagctgatggagctcagaattccactgtcaagaaagagcagtagaggggtgtggctgggcctgtcaccctggggccctccaggtaggcccgttttcacgtggagcatgggagccacgacccttcttaagacatgtatcactgtagagggaaggaacagaggccctgggcccttcctatcagaaggacatggtgaaggctgggaacgtgaggagaggcaatggccacggcccattttggctgtagcacatggcacgttggctgtgtggccttggcccacctgtgagtttaaagcaaggctttaaatgactttggagagggtcacaaatcctaaaagaagcattgaagtgaggtgtcatggattaattgacccctgtctatggaattacatgtaaaacattatcttgtcactgtagtttggttttatttgaaaacctgacaaaaaaaaagttccaggtgtggaatatgggggttatctgtacatcctggggcattaaaaaaaaaatcaatggtggggaactataaagaagtaacaaaagaagtgacatcttcagcaaataaactaggaaatttttttttcttccagtttagaatcagccttgaaacattgatggaataactctgtggcattattgcattatataccatttatctgtattaactttggaatgtactctgttcaatgtttaatgctgtggttgatatttcgaaagctgctttaaaaaaatacatgcatctcagcgtttttttgtttttaattgtatttagttatggcctatacactatttgtgagcaaaggtgatcgttttctgtttgagatttttatctcttgattcttcaaaagcattctgagaaggtgagataagccctgagtctcagctacctaagaaaaacctggatgtcactggccactgaggagctttgtttcaaccaagtcatgtgcatttccacgtcaacagaattgtttattgtgacagttatatctgttgtccctttgaccttgtttcttgaaggtttcctcgtccctgggcaattccgcatttaattcatggtattcaggattacatgcatgtttggttaaacccatgagattcattcagttaaaaatccagatggcaaatgaccagcagattcaaatctatggtggtttgacctttagagagttgctttacgtggcctgtttcaacacagacccacccagagccctcctgccctccttccgcgggggctttctcatggctgtccttcagggtcttcctgaaatgcagtggtgcttacgctccaccaagaaagcaggaaacctgtggtatgaagccagacctccccggcgggcctcagggaacagaatgatcagacctttgaatgattctaatttttaagcaaaatattattttatgaaaggtttacattgtcaaagtgatgaatatggaatatccaatcctgtgctgctatcctgccaaaatcattttaatggagtcagtttgcagtatgctccacgtggtaagatcctccaagctgctttagaagtaacaatgaagaacgtggacgtttttaatataaagcctgttttgtcttttgttgttgttcaaacgggattcacagagtatttgaaaaatgtatatatattaagaggtcacgggggctaattgctggctggctgccttttgctgtggggttttgttacctggttttaataacagtaaatgtgcccagcctcttggccccagaactgtacagtattgtggctgcacttgctctaagagtagttgatgttgcattttccttattgttaaaaacatgttagaagcaatgaatgtatataaaagcctcaactagtcatttttttctcctcttcttttttttcattatatctaattattttgcagttgggcaacagagaaccatccctattttgtattgaagagggattcacatctgcatcttaactgctctttatgaatgaaaaaacagtcctctgtatgtactcctctttacactggccagggtcagagttaaatagagtatatgcactttccaaattggggacaagggctctaaaaaaagccccaaaaggagaagaacatctgagaacctcctcggccctcccagtccctcgctgcacaaatactccgcaagagaggccagaatgacagctgacagggtctatggccatcgggtcgtctccgaagatttggcaggggcagaaaactctggcaggcttaagatttggaataaagtcacagaattaaggaagcacctcaatttagttcaaacaagacgccaacattctctccacagctcacttacctctctgtgttcagatgtggccttccatttatatgtgatctttgttttattagtaaatgcttatcatctaaagatgtagctctggcccagtgggaaaaattaggaagtgattataaatcgagaggagttataataatcaagattaaatgtaaataatcagggcaatcccaacacatgtctagctttcacctccaggatctattgagtgaacagaattgcaaatagtctctatttgtaattgaacttatcctaaaacaaatagtttataaatgtgaacttaaactctaattaattccaactgtacttttaaggcagtggctgtttttagactttcttatcacttatagttagtaatgtacacctactctatcagagaaaaacaggaaaggctcgaaatacaagccattctaaggaaattagggagtcagttgaaattctattctgatcttattctgtggtgtcttttgcagcccagacaaatgtggttacacactttttaagaaatacaattctacattgtcaagcttatgaaggttccaatcagatctttattgttattcaatttggatctttcagggattttttttttaaattattatgggacaaaggacatttgttggaggggtgggagggaggaacaatttttaaatataaaacattcccaagtttggatcagggagttggaagttttcagaataaccagaactaagggtatgaaggacctgtattggggtcgatgtgatgcctctgcgaagaaccttgtgtgacaaatgagaaacattttgaagtttgtggtacgacctttagattccagagacatcagcatggctcaaagtgcagctccgtttggcagtgcaatggtataaatttcaagctggatatgtctaatgggtatttaaacaataaatgtgcagttttaactaacaggatatttaatgacaaccttctggttggtagggacatctgtttctaaatgtttattatgtacaatacagaaaaaaattttataaaattaagcaatgtgaaactgaattggagagtgataatacaagtcctttagtcttacccagtgaatcattctgttccatgtctttggacaaccatgaccttggacaatcatgaaatatgcatctcactggatgcaaagaaaatcagatggagcatgaatggtactgtaccggttcatctggactgccccagaaaaataacttcaagcaaacatcctatcaacaacaaggttgttctgcataccaagctgagcacagaagatgggaacactggtggaggatggaaaggctcgctcaatcaagaaaattctgagactattaataaataagactgtagtgtagatactgagtaaatccatgcacctaaaccttttggaaaatctgccgtgggccctccagatagctcatttcattaagtttttccctccaaggtagaatttgcaagagtgacagtggattgcatttcttttggggaagctttcttttggtggttttgtttattataccttcttaagttttcaaccaaggtttgcttttgttttgagttactggggttatttttgttttaaataaaaataagtgtacaataagtgtttttgtattgaaagcttttgttatcaagattttcatacttttaccttccatggctctttttaagattgatacttttaagaggtggctgatattctgcaacactgtacacataaaaaatacggtaaggatactttacatggttaaggtaaagtaagtctccagttggccaccattagctataatggcactttgtttgtgttgttggaaaaagtcacattgccattaaactttccttgtctgtctagttaatattgtgaagaaaaataaagtacagtgtgagatactgaaaaaaaaaacactaaaaaaaacnnnn

SEQ ID NO: 13704 - DNA, 3152 bp, Homo sapiens
  misc_feature 3148, 3149, 3150, 3151, 3152: n = A,T,C or G
tgagtctaaatttatatgttgaaatgctaccttttttaaaataagaaactaaataaaagctaaaattaaccctcactattgggaataagcttgcggccgcgccaccgccggagagggaggcccgagcgcaggagcctctggtggatgggtgcagcggcggcgggaggacgcggaagaggagccccgggggtagcggcggcgcgagcaggggcgcggggaccgggctgtctgaggtgcgcgccgcgctggggctcgcgctctacctgatcgcgctgcggacgctggtgcagctctcgctgcagcagctcgtgctacgcggggccgctggacaccgcggggagttcgacgcgctccaagccagggattatcttgaacacataacctccattggccccaggactacaggaagtccagaaaatgaaattctgaccgtgcactaccttttggaacagattaaactgattgaagtgcaaagcaacagccttcataagatttcagtagatgtacaacggcccacaggctcttttagcattgatttcttgggaggttttacaagctattatgacaacatcaccaatgttgtggtaaagctggaacccagagatggagcccagcatgctgtcttggctaattgtcattttgactcagtagcaaactcaccaggtgccagtgatgatgcagttagctgctcagtgatgctggaagtccttcgcgtcttgtcaacatcttcagaagccttgcatcatgctgtcatatttctctttaatggtgctgaggaaaatgtcttgcaagccagtcatggtttcattactcagcacccctgggctagcttgattcgtgcattcattaacctagaggcagcaggtgtaggagggaaagaacttgtattccaaacaggtcctgaaaatccttggttggttcaagcttatgtttcagcagctaaacacccttttgcttctgtggtggctcaggaggtttttcagagtggaatcattccttcagatactgactttcgtatctacagggattttgggaacattccaggaatagacttagcttttattgagaatggatacatttatcacaccaagtatgacacagcggacagaattctaacagattccattcagagagcaggtgacaacattttagcagttcttaagcatctagctacatctgatatgctggctgctgcttctaagtatcgacatggaaacatggtcttctttgatgtgctgggcctgtttgtcattgcctacccctctcgtattggctcaatcataaactacatggtggtaatgggtgttgttttgtacctgggcaaaaaatttttgcagcccaaacataagactggtaactacaagaaggacttcttgtgtggacttggcatcactttgatcagctggttcactagccttgttaccgttctcattatagcagtgttcatctctcttattggacagtctctctcatggtataaccacttctatgtctccgtttgtctgtatggaactgcaactgtagccaaaataatacttatacatactcttgcgaaaagattttattacatgaatgccagtgcccagtatctgggagaagtattttttgacatttcgctgtttgtccattgctgttttcttgttaccctcacttaccaaggactttgctcggcgtttattagtgctgtctgggtagcattcccattgctcacaaagctctgtgtgcataaggacttcaagcagcatggtgcccaaggaaaatttattgctttttaccttttggggatgtttattccttatctttatgcattgtacctcatctgggcagtatttgagatgtttacccctatcctcgggagaagtggttctgaaatcccacctgatgttgtgctggcatccattttggctggctgtacaatgattctctcgtcctattttattaacttcatctaccttgccaagagcacaaaaaaaaccatgctaactttaactttggtatgtgcaattacattcctccttgtttgcagtggaacattttttccatatagctccaatcctgctaatccgaagccaaagagagtgtttcttcagcatatgactagaacattccatgacttggaaggaaatgcagttaaacgggactctggaatatggatcaatgggtttgattatactggaatttctcacataacccctcacattcctgagatcaatgatagtatccgagctcactgtgaggagaatgcacctctttgtggttttccttggtatcttccagtgcactttctgatcaggaaaaactggtatcttcctgccccagaagtttctccaagaaatcctcctcatttccgactcatatccaaagaacagacaccttgggattctataaaattgacttttgaagcaacaggaccaagccatatgtccttctatgttcgagcccacaaagggtcaacactttctcagtggtctcttggcaatggcaccccagtcacaagtaaaggaggagactactttgtcttttactcccatggactccaggcctctgcatggcagttctggatagaagtgcaggtttcagaagaacatcctgaaggaatggtcaccgtggccattgctgcccactatctgtctggggaagacaagagatcccctcaactggatgctctgaaggaaaagttcccagattggacatttccctctgcctgggtgtgcacactacgaacacatagaattccactctggtggaatgaagccaaagagaattgccacaggggactcacccatgtgcactggagcaaccaatcgtacgtgcatgatgcaacgacagaacaagaatacacggacacatcacaagaacgcaccgcgagaaggcgacacgaggacacaaacagacaagggaaacaaataacacacaatcaaccagagaacgacagcaaccgaaaaaggcagcacaggaaaacaaacaagacagaagaacagaaaagacagaaggaaaggagacgacgcaacaaacgacgaagcaccagcgaacaaaacagaagcacgacaaggaaaaggcaacagcaaagaggacacagacaacaagacaaggaaaccaagaagagagcacaacaagatagaaacaataaaggacacgaatcaaaaannnnn

SEQ ID NO: 13705 - DNA, 264 bp, Homo sapiens
acgctaggccgcggccttcttttctcccagaaaggtgaccctccccaccctgcgtcctgctccttccgtccatactgatgtttgttttgctggaggccagtagcaactggacagtagctctaggggaggagaatccacctgcggcgaagggtgggatttgttttctttgagccttctccagtgtggggcagctggcgcatctccacttagcgccgggggtccgggatcctacatcgcagggactggggatctcctgggttctgt

SEQ ID NO: 13706 - DNA, 416 bp, Homo sapiens
  misc_feature 416: n = A,T,C or G
acgcgggatttttgtttttttatttgccaatatttgatattaggtcaaggcctagttgaaattccctgacatctttcttgtataaacaatacccacaatgctaatctttatgattttcaatctctgtctctctaaattggcatggtaatttaaagatattgggaaccaatctaaatgcagaatcctcctagatttttactaaatttccccaaaacttcttagttatctaacctacatcagctttagtattttttaatgactcattttgatgaaggccattcaaacattctgcttaattttgatagaaacaatcactttctgtttacctcgtatttcatggatttatatggaataatctgttcacatactatttaattcatacagttggagtaaagaggcttggggccaaacccagn

SEQ ID NO: 13707 - DNA, 5586 bp, Homo sapiens
  misc_feature 1, 5586: n = A,T,C or G
nagtcgaccccgcgtccgtagcgctcccgcgccgcgcccggccgccttcatgtgaagcgccggccctccgccccttccctccccttccttccctccctccctccctgtcccctcctcctcctcctcctcctccggcgcccgcttcagctccccggggccccctgcccggccgggcgctgacagcaagggcgggggtccctgccgccgccttgtctcgcgcagggtccggctggggtagcggagcccccagtgcggccatggaccggcccctgtcgtcgtcggcggaggcggaggaggaactggagtggcaagtggcgagtcgcaggaggaaggcctgggccaagtgccgcagctcctggcaagcgtcggagacggaggatctgtccacagaagcgacgacgcaggacgaggaggaggacgaggaggaggacctccccggcgcgcagctgccggcagcggggggaagaggaaacgtgcccaacgagaagatcgcgatatggctcaaggactgccgtacacctttgggagcctcactggatgaacaaagcagtagtacactcaagggtgtgcttgtgagaaatggaggaagttttgaagatgatttgtcattgggagctgaagccaaccacctccatgaaagtgatgctcaaattgaaaactgcaataatatcttggccaaagagagaagattacagtttcatcagaaagggagaagtatgaattccactggatctgggaaaagtagtgggacagtttcaagtgtttcagaattgttggaactttatgaggaagatcctgaagaaattctttataatcttggatttggacgtgatgaaccagatattgcttctaaaattccttccagattttttaattcatcatcctttgccaaagggatagatattaaagtatttttgagtgctcagatgcaacggatggaagtagaaaacccaaattatgctttaacaagccgttttcgtcaaattgaagtgcttactactgtggccaatgcgttttcttctttatattctcaagtctccgggacgcccctgcagagaattggaagtatgtcctcagtgacctctaacaaggagacagacccacctccacctttaactcgaagtaacactgcaaatcgtttaatgaaaacactctcaaaactgaatttatgtgttgataaaacagagaaaggagaaagtagtagtccttctccatcagctgaaaaaggaaagattctaaatgtttcagtgattgaagaaagtggcaataaaaacgatcaaaagtctcaaaaaattatgaagaagaaagagtcatcttctatgttggctacagttaaagaagaagtctctggtagttcagcagctgttacggagaatgctgatagtgatagaatttctgatgaagcaaatagtaattttaaccaaggaactgaaaatgaacaaagtaaagaaactcaaagtcatgagagtaaactgggtgaggaatctggtattgtagaatccaaattagatagtgatttcaacatatccagccacagtgagctggaaaatagcagtgagctgaaaagtgtccatatatccacacctgaaaaagagccttgtgcaccactgacaataccatccataagaaatataatgacacagcagaaggactccttcgaaatggaagaggttcaaagtacggagggagaagctcctcatgttccagccacttaccagctaggtcttacgaagtcgaaaagagatcatctgttacgtactgcaagtcagcattccgatagcagtggttttgctgaagattctacagactgcctatcccttaatcatcttcaggttcaggagtccttgcaggctatggggagtagtgctgatagttgtgacagtgagacaacagttacgtcacttggtgaagaccttgccacaccaacagcacaagaccagccttattttaatgaatcagaggaggagtctcttgtccctcttcagaagggactagagaaggcagcagcagttgcagacaaaagaaaatcaggtagccaggatttccctcagtgcaacaccattgagaatacaggaactaaacagtccacctgtagtccaggggatcatatcattgaaattactgaagtggaagaggatttgtttccagcagagacagtagagctactgagggaagcaagtgctgaaagtgatgtgggtaaaagcagtgaaagtgaatttactcagtataccacacaccatattctgaaatcattggcttctattgaagctaaatgcagtgatatgagctctgaaaatacaactgggcctccctcttccatggacagagttaatacagctttgcaaagagctcaaatgaaggtttgcagtctgtctaatcaaaggatggggcgtagcctgctaaaatcaaaagatttgttaaaacaaaggtacttatttgcaaaagctggctatcctctaagaaggtctcagtctttaccaaccaccttattgagcccagtaagggttgtgtcctctgtcaatgttcgattatctccaggaaaagagaccagatgcagcccaccttccttcacctataagtacacacctgaagaggagcaggaattggaaaagcgggtgatggaacatgatggtcagtctttagttaaatcgaccattttcatctctccatcatctgtgaagaaagaagaagccccccagagtgaggcgccgcgggtggaggaatgccatcatggaaggactcctacctgttcacggcttgctccaccaccaatgtctcagtctacctgttcccttcattccatccactctgagtggcaagaaaggcccctgtgtgagcacacaagaactctgagcactcacagtgttcccaacatatcaggggctacttgtagtgccttcgcttcccctttcgggtgtccttactcacatagacatgccacctacccttaccgagtgtgctctgtgaatcctccttcagccatagaaatgcagttgcgaagagtattacatgatattagaaactcactgcagaatctttcacagtaccctatgatgagaggacctgatcctgctgctgctccatatagtactcagaaatcatctgttctacctctttatgaaaatacttttcaggagctccaggtaatgaggcggagcctgaatttgtttagaacacaaatgatggatttagaattggcaatgctgcgtcagcaaaccatggtttatcatcatatgactgaggaggagaggtttgaagttgatcagctccagggtttgagaaattcagtccgaatggaacttcaggacctggaactgcagctggaggagcgcctgctgggcctggaggagcagcttcgtgctgtgcgcatgccttcacccttccgctcctccgcactcatgggaatgtgtggcagtagaagcgctgataacttgtcatgcccttctccattgaatgtcactgaactgatgcaggagcagtcatacctgaagtctgaattgggcctgggacttggagaaatgggatttgaaattcctcctggagaaagctcagaatctgttttttcccaagcaacatcagaatcatcttctgtatgttctggtccctctcatgctaacagaagaactggagtaccttctactgcctcagtgggcaaatccaaaaccccattagtggcaaggaagaaagtgttccgagcatcggtggctctaacgccaacagctccttctagaacaggctctgtgcagacacctccagatttggaaagttctgaggaagttgatgcagctgaaggagccccagaagttgtaggacctaaatctgaagtggaagaagggcatggaaaactcccatcaatgccagctgctgaggaaatgcataaaaatgtggagcaagatgagttgcagcaagtcatacgggagattaaagagtctattgttggggaaatcagacgggaaattgtaagtggacttttggcagcagtatcttcaagtaaagcgtctaattctaagcaagattatcattaaacagaaattataggttggcatggatcctattagctgtgtaatactggaattatcaatgatatgcactggtggaggtgttatttgtgctttagaagatacttgctgttgagctgggctactgtatacagtgtacaatgtgtatttcttcaaccatatattttaaaaagacgtacatagaaacttaggcactttgctatttcttttctaaactatcaaaaactctagcagtttgaaaagcctaatatttatttgtatgtcaatatttttcatttgattccctattagaattaattttaaaacttgaagacttccagacttatccaacttataaataacatatttcttcagactaacatcttaaaacactgacctctatgaggtatttactgtgcaataactgattcatttttttcagagcttgaagcatccaatgatttttccctccactgctgttaattaatgtcacttccaagaagaaaaactgttctgttgtaaaaaatataattgctcttaattcttggggaggttactaatagcagtaggatagaattttatgaggttacctacaactacttaatgtacttacactgtaagccttgttgctttacccaagacaaatgtaattttatcattgcttatgtagtatttttcttttggaaatgtgccttatgttaaacactatgtacttttactttttgcattgtccagacttctttattagatggagatgtttctttttctgtcttctagactaaatagagtatcatccaaataatggggcctatgacttgaatgaatagaaatgaataagctggtgtttgttttttcaaaatggaagtaatttagatttgttctcctcatacataaaatgattttagttcagttttaaccagtgaaaactttgtttttatgaaaaaaaaggaaaatggtttcccatttggttttatatgtgttaaataaatgtgtaaagtaaccaccaaatgttattagaatttttcttctagcatttataattttttcaactcctattgtgtttctttgtgtgtgatattttaatcaaaagtggttgagttgttaacagtgttctttgaaagaatctctaaaaggcttataaatgtttgaaatatcacacaaaggctgatttctaaaatatatatatattaaaacaataaagtatttattttgcctaaaaaaaaaaaaaaaaacaaaaaaacaaaaaacattgtgcgggggcggcttcggggcctcgagaaaaacgatttctaaaaacacacttctcggtggggccgcgcggggcgcccactgaaggggtaacgcggcacaacgttgtggccaaaaaccggggggttcccccaagggagaacccgggggccacgagacagtaaggggtggtgggtttctctccactcaaataaaaaaaaacgggccggggcgggacgccaggacggggtgccgcgagacaacattcgcaaaaggggagagttccgagggggcaatcaagcgggggctcacaaacaaccaggagaggcccaaaggagggcgtcagaatataaattaagcn

SEQ ID NO: 13708 - DNA, 372 bp, Homo sapiens
acaaactctcattggctgttgtttcaacagtgtaaccttaattacagaaaaaaaacctatctcaatatcctttgattaagcaaatatctaaaactatacaggttgaatatcacaaatctgaaaatctgaaatgctccaaaaccaataactttttgagtgctcaaaggaaatgctcactggggcgtttcagatttcagattttcagatttgggatggttaactgataagtataactcaaatattccaaaatttgaaaaaatttgaaatccaaatcacttctggttccaagtatttcagataagggatactcaacctgtatttagtaagtgcagttgcgtgtgcattaaagaaaagcttaagaacagaagaaaa

SEQ ID NO: 13709 - DNA, 886 bp, Homo sapiens
  misc_feature 1, 2, 3, 4, 5, 203: n = A,T,C or G
nnnnngtaaacatatcgaattagtaatggtgactattataccataactttccatttgccatcccttaactgagagaaacttttctagagttcctctcacacaatttcaatgatgttctcataatgtgtttggctttgtcgcacatgatatgcatacaaagaggcattttttctgtgtctggaatttgttttttattgtgcttngcatatgcttaatttgaatgatgcctataggaagtaagctagacttcaaagggggaagattggcatttggagaagtacagcatgcactgcatttaatgtgtatatcaggacaaaaaatgttaatgagagaacacacacagttttcttcctccccgaccagccaaattctccaccctccagccccattcaaataaaggagagaagagtctttcttggtggataagaagcttgattgttttacataatacaagaatatagagattaatgcgcgcggggtggggagggtgagaagggaaaggaaagagcctgatgccagctcaacaggaagtgagtattagacagagaagagaagaaccagggacctaagccctgggaaccctcctttggtaatagggtcagagagaacgaagaaaagcaaagaagcctcagagaagtaaccggtaaggtaggaggaaaaccaaagagcatggtgtcctggaagctcagtgaagaactggatcaaggaggaggagtgaccagccaggtcaaaagctactgatgcatcaaggaggatgaagaccaagaactggccgttgggatttaacaacatgaaggtcattgctggtctcaccaagcagttttggaggagtgatgggggccaaagctgattggactgggtttaagagagaaaaaaaaaaaaaaaa

SEQ ID NO: 13710 - DNA, 2659 bp, Homo sapiens
gcgtccgggcggttggggcggagcagggggctggcgcgggaagcggggctgtctggctcggttacgcccccacctcgccaggaatctaggagtcggtttgttttccgaacccatctccttccgctctcccgcccctgcaggctgtgtgccgagcttggaagaaagtgtgacccgttcgacggaacaaaggacatgacagcccggccccgtgcggccactgcggagcgttaggaacattccctaaaatggcggccggcgcgtcggaacagggcgggaggcggcggcgcgtgggggcgggacggggaggggcgcggccagccgggcttctgcttccgcgaccccggcggtgcagggcgggtggagtcgcggagtagtcctcatggccgccccgccggagcccggtgagcccgaggagaggaagtcccttaagctcctaggatttttagatgttgaaaatactccctgcgcccggcattcaatattgtatggttcattaggatctgttgtggctggctttggacattttttgttcactagtagaattagaagatcatgtgatgttggagtaggagggtttatcttggtgactttgggatgctggtttcattgtaggtataattatgcaaagcaaagaatccaggaaagaattgccagagaagaaattaaaaagaagatattatatgaaggtacccacctcgatcctgaaagaaaacacaacggcagcagcagcaattgaacaatcttgagcatagaagtcaatgtaaacgaagttaagatcaaccacataaaacatttcatgtgcaataagctctcaatcaagtaaataaagtttaagttgtagtcatttttttcccacacttgtgtggaatgaaaacttgccagtttattctggccctgtgtctactgccaggatagcattcttacgtgttacatatagtggacttgtcatccttaaaatgtgaacagaatttattggcagtgtggcaaagaattataaaacatagtgtttaatgtacttggagtttccttgtagtagtaagtatagagtttgatgataagtaaacgtcccttaacaaaaacctcaaccttattactatcccattaaaaaacagcaaatacttactgagttcttgtaagagctaatgtcattgtaagatttaaaactaagggcttttatcactttgcaaattattttttaaatgcattcatcatttgacagtgttctctcatttcttaaaatgcgagtcatcttccaaaagagttgtttttaactgccctaaacatttttggggaagtatgcagggtttaaatttttaagtataattagttctgaattaaaatatgcacatggaacttgtctggcagactgatgcaatagtaaaacaactgcagaattactattaatgtaaacaatccatttgaaagtcaatcagctgctcccattaaaatattatttaaaatacaatacccacagcatctaactaaatcctcaggatttattctccgggagaaattatccctttctaggaaaatgaagttatttctggttttaattcatacaatactttaagaaaatctgttaaatataacaaaacacaagctagatgcttaagaaatgcttaaagaaatattggggcgaaggtaacagcagtcaacaggattgtggccattactggtcctattattttgatgtaccatggaaggcacagaaatcgagcaaggaagaaaatattagttattttgatctacatctttttctaaagaaaagtggagcttgcctccagttcaattcacaagagcattttccctcccatgcccaccttttcttgtggctgtcgctaggaaggatgcagaggctgtgtggtttaccaaatgccttaacttagcagtgaatgacaactgtcaaacacatgttgagggaaaatttttactgattcacaaaaaggaagacagtttgcccactcttagtggcacaaatcaaagctgcatgcactacattatccaaattagtcgtaaccaaatagttaaaaaattctgctgggcacggtggctcatacctgtaatcccagcactttgggaggccgaggcagttggatcacctgaggttaggagtttgagaccagcctggccaacagggtgaaaccctgtctcgtctaaaaatacaaaaattagccgggcgtggtggtgcatgcctgtagtcccaggtactcaggaggctgaggcaggagaatcacttgaacccgaggtggggcaggcggaggttgcagtaagccaagatcgcgccattgcactctagcctaggtgacagagtgagactccatctcaaaaaaaaaaaaaattccataggatgttcaaccatgttttcagaggccgcactgcatgaatgcgggaaaatgttgatgatcactaatcaataatctgatatttaacaaaatatggacaggccacttatgctcagttttaccttagttattccttggtatccacaggcccaagtccctttaaataaaataccctcatatttccatataatctacatacattctcccatatactttaaatcatctctagattacttataatgtctaatacaaaataaatgctatgtaaatgtaaaaaaaaaaaaaaaaagggcggccctcgcgatctagaaccggac

SEQ ID NO: 13711 - DNA, 285 bp, Homo sapiens
  misc_feature 285: n = A,T,C or G
cctgcaagtagtccaaggccagtgaatcaattactgcttgtacaatgtgtgcatcatcttcttgactcctaggaataactatgaggtctggggggggaaaaaatcacataattttgtatccatgagaggccaagttttcatctcattgtctctgactaggctacttgaatatgctcaactgctataaaggctctgcccaaacagaacatgctgtaaagtacagataaagttaataaaccctgaactctacccagtaaaaaaaaaaaaaaaaaaaaaaaaaaaagn

SEQ ID NO: 13712 - DNA, 713 bp, Homo sapiens
  misc_feature 708, 709, 710, 711, 712, 713: n = A,T,C or G
acatgtgctgacgaagaaaagggaagatggagcctccatgttgaacatgcctggccctcaggtaacccttttctgttggcacaactgctggcattcacctgtgcaagcttccagcttgcttatcggtgtttgcagctcgatatttcaggctgctctttgttagaaaataaatgatttgggggctgctttttgttaaaagggaaattctgccgaggactctgttctccttactatctgcctaaataatttctttctagctcctgtatcaaaagcattttttaatattgtaaatttggaatattatattacctgattttaagactgctttaaagctagagtaaattaaatgtgtgagatgaacataagaacaaacatatggataagtgaaacaaaacggagttcagaaataaacccacacgtatatagaaaattaatattggatctaggggcgaagtaattaaatttacgaagttttttttcatttaatgataccagaacaagtgactattcctgtgcacaaaaataaaccttgcttctttcctcatatatatcaaaattaattgaatgccaaaattggaaccaacctaaatgtcatcaactggtgaatggatgaccaaattgtggttacattttacaatggagcactgatcagcaatacaaagaaacaaataactgatagacaactgaaaaagagcagaccaaacacannnnnn

SEQ ID NO: 13713 - DNA, 2758 bp, Homo sapiens
  misc_feature 1, 116, 147, 2750, 2751, 2752, 2753, 2754, 2755, 2756, 2757,2758: n = A,T,C or G
nagagccctgccctcagctgaagggagtcttctttttttttttttttttccgctgtttttttctccgcccctaagaggttgactccaaacccggagttccgctaggtccaacaggngggcttacggcgtgagcggcgtacctggggngaggcttaggcagcggcaaccgctgattggcagttaaggggttcactccccatctcctgctcgggcgaaaccgggacagccaatcagagagagtcctgacggaaacggcccaatcctggagcagggctgagggagggggcggggacaaatggctcaggtggactccgggctggagctgtcctgggggagcttgtttgcggcagcggctgctgctgccactgctgtgctgggggcccggtcgccaggcaaaaagccctcccacgtttgaggggagtcatgagccgtttcctgaatgtgttaagaagttggctggttatggtgtccatcatagccatggggaacacgctgcagagcttccgagaccacacttttctctatgaaaagctctacactggcaagccaaaccttgtgaatggcctccaagctcggacctttgggatctggacgctgctctcatcagtgattcgctgcctctgtgccattgacattcacaacaagacgctctatcacatcacactctggaccttcctccttgccctggggcatttcctctctgagttgtttgtctatggaactgcagctcccacgattggcgtcctggcacccctgatggtggcaagtttctccatcctgggtatgctggtcgggctccggtatctagaagtagaaccagtatccagacagaagaagagaaactgaggccagcattatcacctccaggactttctcgttttccaccttggccatcttcttccttcgtcgtctctcctctttaatttcttttctattccatcatctgcccttttattcacttttagcctctttttttaatttttaaaatttaaagatatgcatactgaaaagtatataacatgtacgtacaatttaaagaataattttaaagtgaatactacgtaactccatccaagtcaagaaattgccagcttctcggaagcccactgtgtctccttcccctacctgcaacctcttccaggctcccttttccagccttcccctttttcccttttattttcatgccttgatttgacttgtgtggtgggaacatgtgaactatgaaacttaaacctgctgcccacccagagcagctgtgaccaagggctgcctcaaggggttgtccacgcaggttgggctcctctctgctgctggacccaagactctgaaccttccaagggacaggcagttcttctaagaagggctcccctgtgtgtgagcaagaccacagctctccttctatctacagatgcatgagggttggaagagtctgggctgtttttagaccttctggtcagctgtatttgtgtaacaacttttgtaataaatagaaaaaccctctgctctgatcagttcttgtactttgacctctgctaagacaagagcatggctgcctcctctgagccctaggagaatcacagctttatgcctgattgaatacaccatagtgagtaggacagctcatgacacaggtcagcctggctgcctccggctccttactgtcatttgctcattcctcttgtattcttgaagtcaaatcttcttttttctcaccttcaagagtctgcgttcacaactaaacactaagtgccctttcttatttcctcctaaagaagaaacagattcttgagagagcagagacaaaaaaatagaactaggcagcatagatgaaacaactgcatgacatgggaagaagacaactaaaccccgaggagaatgcactggaatggacagttgctcttaaaccctacccagagggcctcccccagctggaccctcatacacagtgtgtgtatccaaaaggccattgctatttcagcaaatatttgttgagtacttctccatgccggacacttgggaaagagaaatgaacgacacaggcaatgcccctgccctgtgggccttatattatagtcaaggtaacagaatcaacaagccaacacaaaaataaagaacttcaaatagggataagaactctaacaaacacaaggtattttggtcaagaaggaatgtggggtgggcagtggggaacgtaacttaaattagatcatcagaaagtcctccctgaggagatggatttttttttgtttttttagagacggggtttcactctgtcacccaggctgggaattgcagtggcacaatccctcactgctgcctcaacttcctgggctcaagtgaccctcctgcatcagcttcccaagtagctgggactgcaagtgtgtaccaccacatccagctaacatttttgggggtgggaagagatggggtcttactatgttgtccaggctaagaggtgggatttgagctgagacttgaatgcccaggagttaaatgtcttaagatatggagcaggccgttagaaaggagggagcagcaactggaaggtagaatagtcttattcaaggaataagaactatgtaatcacagcatggtgaagagttaggaagtgaaagaaaaggtcagaaaaggaggcaaggggcttataagggtgtgataagaagcttgatgtttacacttaaatacattgggaattctcttatcagttaagtctctttaggtgaaaggacaaaacctaccttaaactagcnnnnnnnnn

SEQ ID NO: 13714 - DNA, 313 bp, Homo sapiens
actgttggtaagcattatgtcccgaggatgaaatcggaggaccaacaggcccaggaggcttcacagcgaacaccacatgcctcgcgcccaaaaggacagcagaccgcgcttcagaacggaaccgccttctccatgtgtaatggataggtaacagagaagacctcgtcccttcctagtcagggcatcagcatgactgagtgcttcctgccccccaccagcagccccagtgaacaccgcagggtggagcatggcagcgggcttacccggacccccagctctgaagagatcagccctactaagtttcctggattgt

SEQ ID NO: 13715 - DNA, 3535 bp, Homo sapiens
acgcggggaagggagagagctgtgcgagcgtgggggagagtttttcgttggaatatacgttgcacatttatggcgattctgagtgtgagggcagacttctgccaggctcagcacagcattttcgctgacaagtgagcttggaggttctatgtgccataattaacattgccttgaagactcctggacaccgagactggcctcagaaatagttggctttttttttttttaattgcaagcatatttcttttaatgactccagtaaaattaagcatcaagtaaacaagtggaaagtgacctacacttttaacttgtctcactagtgcctaaatgtagtaaaggctgcttaagttttgtatgtagttggattttttggagtccgaaggtatccatctgcagaaattgaggcccaaattgaatttggattcaagtggattctaaatactttgcttatcttgaagagagaagcttcataaggaataaacaagttgaatagagaaaacactgattgataataggcattttagtggtctttttaatgttttctgctgtgaaacatttcaagatttattgattttttttttcactttccccatcacactcacacgcacgctcacactttttatttgccataatgaaccgtccagcccctgtggagatctcctatgagaacatgcgttttctgataactcacaaccctaccaatgctactctcaacaagttcacagaggaacttaagaagtatggagtgacgactttggttcgagtttgtgatgctacatatgataaagctccagttgaaaaagaaggaatccacgttctagattggccatttgatgatggagctccaccccctaatcagatagtagatgattggttaaacctgttaaaaaccaaatttcgtgaagagccaggttgctgtgttgcagtgcattgtgttgcaggattgggaagaaaaagaaggggagcgttcaattccaaacagctgctttatttggagaaataccgacctaagatgcgattacgcttcagagataccaatgggcattgctgtgttcagtagaaggaaatgtaaacgaaggctgacttgattgtgccatttagagggaactcttggtacctggaaatgtgaatctggaatattacctgtgtcatcaaagtagtgatggattcagtactcctcaaccactctcctaatgattggaacaaaagcaaacaaaaaagaaatctctctataaaatgaataaaatgtttaagaaaagagaaagagaaaaggaattaattcagtgaaggatgattttgctcctagttttggagtttgaatttctgccaggattgaattattttgaaatctcctgtctttttaaactttttcaaaataggtctctaaggaaaaccagcagaacattagcctgtgcaaaaccatctgtttggggagcacactcttccattatgcttggcacatagatctccctgtggtgggattttttttttccctttttttgtgggggagggttggtggtatatttttcccctcttttttccttcctctcctacatctcccttttcccccgatccaagttgtagatggaatagaagcccttgttgctgtagatgtgcgtgcagtctggcagccttaagcccacctgggcacttttagataaaaaaaaaaaaaaacaaaaaacaacaccaaaaaaacagcagtgatatatatattccaggtggtttttagtctttactgatgaaagggtgttcatgttagtttcttcaaaaccctatctaatactaggcaaagtagccaagagccttttgttttgtttttattttgataaattagtggagaaatggcattttaagaggagtctcttctcaacttacctgagagtcgaattcttctcttccctaaccaatgaagctaagtggttatcccagaaacttgtcttctaaaagggaggactccaggccatcaataaagatgtccaggcagtgagcgtactttttacaccctgtagaattgtgggctgtagcgttactctgattttctgtctagtatcagagaatgctggtagcttaaaatttttattttaggacttgtactctgaattttcaggaaccgtcaaaggagcagcagcaaattcacatattttcgacttgagaaatgcttgtggtatgtgttttccaaactgccccctatatgtaaagttcagtttaaccactgattgccttgttattactaggttttttgagattaaaaaaaaaaaatccctggtttaaaaccaacaatgatgcctagtgagtatgtgtccacaggccataacagggtagaagagagacatcgtgcaacccaatgagtagtgaagggactgtgttgcttgtgaagcggtgtagtagcatttttgcagattcttggctgggtttagtgtactgatctagaaaagctgtttttctgctcctttgtggaaggcagttatgatcaggctgcatggacaaagcaggtagaggggcaccatcaggggctcttgcactattttcacctctaaatattacatactcagtagtgccctgcttctagggctctgaatacgggcttaaagtcatcttgtcctgctggaatttgctgtgcagagccataagcctcccattttgttagcgtcagctaggccaataggaacagaccgggaccttgtctcacactgatgatacctcacatgttgaccggctatgtgaactgcctatttcctatgctggagttttgatttttaactaaacgcaaatctgtagattctctcctctcccatcccagaaaacaaaacaaaataatgcttttcgaaattgtttctaggactttaaaacataatggtatatccaaaattctttatttcagaatgcaacaatagattccattaatatagactcaagatcaaaacagcatacctgctaagctaagatagatggtgttgattccactgggttttgatcaatacaataacaaacctttttcctttgacatactctgaattttgttgtttggggggagggggtgtgtgtgtgtgtgtgtgtgtgtgtgtgtgtatgtgtgtgtgtgtgtgtgcacgcgcagtgtccatcagtatcagtgcctgcctgagttaggaaaattacattcctggttctgtattgaggagaaggatgtataaagcaacatgaaacattagccctccttttattttaaagactaatgttaattgttcttaaaactggattttttttccttaaagcaatttttttcttttcgatttaatgaagtattgctagctgaagccagtttgacatagagagatgtcagattgatttgaaaggtgtgcagcctgatttaaaaccaaaccctgaacccttttaaagaacaataaaacatattttacacgcattttctcctaacttacattactctccttgtctctttctcatacttccactagcttctttgggccttctccctacgtacttcaactaatattcatcctcgggcgtttatgcctctcctttattacctttgccc

SEQ ID NO: 13716 - DNA, 1412 bp, Homo sapiens
  misc_feature 1, 2, 1409, 1410, 1411, 1412: n = A,T,C or G
nnaatcctccctcaactgccctgaaactggataagccacacctaaagggctttgaaagcccatttgcccttttgccctttgacccatgtggtcagaagtcaggtttgtgtttcaattctaccacctgaagtgtcaccagagttatttaactggcaaggtgaggaaagggaaacaagaattctttttcctgaatacccatttaagttccttgacaactggaacaaagtcatagagagcaaagggacaatgtaacaaatctacccattttcctagtagacactgaattcagctggtagtcgagggcttttaattaaaacattttattgtttctaagaatgttcacacaatccaagacttcaaaaatgagtctaaagccatggaaacacatttatcaccttcatgcttgttgaaggacaccagcaaaaatcaatgctaaacctatcagcttcatccattaaagcatttgcatagagaaactaacttccattttacaactctttaatgacagggagaatatccaacaaatcgcaagtaaaatagcatagaccacaaggaaagaaactaagacaagtcaaaaatacaccaagtaagaaattcaatacaactggaaaacatactcataggcaccaacattcctcctttggacacctgttccttactgccctcagatgccccaggacaggggtaatggctgagcatggaaaaagtaggtaatggggtcacacaaacttggtggtcctgcaccaaactacaaagattagctcaattatagcattgtgctaacagtaaaagtagtaaaaaataaaaaattaaaaaaaataaaaaaataaactaaattcctacacaaagtttctcgagtacagaggtgaatgtcttctcctcggctacagcctccaccccaaatacaacccaccagttaagagggataacactaaacaatgctgtttagtgtcatgtgcacccatctacatgaccagaaaaatactgttcatatgcaaaaaaatttactaattgttaatgcctggccagatgttcttgtgaagagcaaggcaggggaaaaacatgttatcaagtgaatactctatccaaactccaagagaaacatctccagtttttcttcagagtcaatttgatcttcaactgagggtccctccattcttggcagtgagaggaacagtgaataatgaaaacaggtgttcagaaacctatgcagtatactccctgggtaaggaaggtgagcagcagtgacctaagacactgacatgacctcatgactagcaagaccaaactttgagaaagctgctccattccagaaatcaatgctaacagatggcaacacaaggcctagataagatctggcttaggctccagaaaagggaattaactttttaaaggatgtttcttgaccnnnn

SEQ ID NO: 13717 - DNA, 355 bp, Homo sapiens
  misc_feature 349, 350, 351, 352, 353, 354, 355: n = A,T,C or G
actttattttttttttttttttctctttttttttttttttttttttttttttttttttttttttttccctaaaccaaaggttgggaattaattataatcgggcttttttacaactaatgatttttggggttggcaacccatgtctgccttttttaacctacacacccgcgggacaaatttttcaatagggggggttcacccagttaacaaagcatagagggtgggacctcaatagggctttcaacaaaaaccccccccgattttccttttgacggcgttcccttaggaggctctgatgtgggcgccccatttttttaaaaggaaaaacaaattttcaatcagggggggnnnnnnn

SEQ ID NO: 13718 - DNA, 950 bp, Homo sapiens
ggttgctccctactgtgtagatgaggaaatggagacctagaaagggaaggaaagaccaacactttgagcacctgcaatgtgcctgaggcaatgtacgcatgagctctgcttcacagcagcccaagagggaggtattattcttcccctgtgtgaatgtgggtgttgaggctcagagaagggcagtgacttgtccaaggtcacatagcaagcaaccgtcagtgggttgagggctaacccaaggtctttctgacttcagagtgtgggatttagaacaaacatttgcaacgtgagattgacagatccatcccccagtgccattccaaagaccagatggggtcataagtgggtgagtacctgacatggtgcccaaggactgggagtagaagcagaatcccatccacctccacctaatcatacagagaaaggagacaggagctgagggagggcagtgctatgtccaagctctcagcaagcagtaggcagagcccaggcccctgctttcccatgcccaccccttcccagttcagggcaaggccacctctccagggcctttccctcccctagagaggaaactccccaagttcctctgaccagacaggagagtgaacgagagaagaaaattccacttcagcacacacacctggagcctgaggctgaaagctggaatcccagactttgacactcaagaaggcatctccacactttttcagcacctccacctgggacattcatgagcaccttgcttccctcccaggggagaggggtgtcccagagacactggggcccttagaaggcactatgagttggcagtgactgcagcagcgtggtgggattgtgggtggtgtaggaagcaggggaagcagatcacagcactcaggatggccagagctgaaggcatcagagtcccctgtccttgttctaaaaaaaaaaaaaaaaaaaaaaaaaaaagt

SEQ ID NO: 13719 - DNA, 381 bp, Homo sapiens
  misc_feature 381: n = A,T,C or G
acttctgggtctaattaccaaattggtcccagggcagagaactctctctcctgcattgcaggggatgcctaggcagtgtgtaggcctaagcctgagaactacccaggccttcccatactttggaagcagatgacactcgacttcttggtttccatctttgcactgcgctgtgtagccctgtgtgtaaacagcaggcactcatgtgccattgactcacggtcagaagcaccacagcattgactgtgtgctctctgactgaggtgggaactgcggtcagcactgggtaacaggttggactgaagatggtctcattcggagagtggggagcaagggtctgcctggaggccttgctcacgtaaggctattggtccttccaggtcn

SEQ ID NO: 13720 - DNA, 1605 bp, Homo sapiens
  misc_feature 1, 2, 3, 1597, 1598, 1599, 1600, 1601, 1602, 1603, 1604,1605: n = A,T,C or G
nnncgtccgcgcgcctgttctgggccgcgtggagtcgccgcgcaggcgcggtcgccgctgttgttgtggtccccatggagctgccgtagcggacccagcacagccaggagcgtccgggatgagctcagccgcggccgaccactgggcgtggttgctggtgctcagcttcgtgtttggatgcaatgttcttaggatcctcctcccgtccttctcatccttcatgtccagggtgctgcagaaggacgcggagcaggagtcacagatgagagcggagatccaggacatgaagcaggagctctccacagtcaacatgatggacgagtttgccagatatgccaggctggaaagaaagatcaacaagatgacggataagctcaaaacccatgtgaaagctcggacagctcaattagccaagataaaatgggtgataagtgtcgctttctacgtattgcaggctgccctgatgatctcactcatttggaagtattattctgtccctgtggctgtcgtgccgagtaaatggataacccctctagaccgcctggtagcctttcctactagagtagcaggtggtgttggaattacctgttggattttagtctgtaacaaagttgtcgctattgtgcttcatccgttcagctgaacaggaggatggatacagccgcgaggctaaaaaacggatttcctcttcctagcttaaaatctgatttacactgttttgttttttaagaaacaaaagtgcatagtttagatttttttttggttgaatatgttggtcctgggactttatgagatagtcttataagaatcacgattttctacacctgtcattgagccaagaaagtccagtttatgacacgtatgtactagtgaacaccgtcctcgatctgtacgaaatgtgaaatgtttagggacatctccatgctgtcacttgtgatttgccctcttatgtattttggtcatattgccaactggaaagtcaaaattttctaacaactttaagtaagttctttgaagacttagtgctgtttttaatccagtttagaaagtaacttaattttaataccgctactaaaaattcgaaaatttcttctttaatcacattcaatatggttaaaagaacaacactaattgacattgcgtgggctttttctccctttgtttaaaatgtcatttgttgagcaagagttgtatagtattatctacttacttgaggctgttaatttttcattacagtgttttgtaaatgtatccacgagaccatgatgcattgttttgtgctcaacttgtgttttgtatttaaagcattttgaatgaagtgtattttataagcatttaatatttatgctctttagaatggaacacagaaaacaaaccttataagtcctgattaaattaatctgaaccaataacctgtgtggcctacaaagtataattctattaaatgttccttaaaacacttttttctaattaaaatctttgcaaatgcttgtgtaacttcctgccttacagctacttgtttgctgtgagccacccgcaactgacaagtggctgttaactgagtcaccatatcccagtaaagctgaattttctcacnnnnnnnnn

SEQ ID NO: 13721 - DNA, 286 bp, Homo sapiens
  misc_feature 286: n = A,T,C or G
actgggagggtgaatggactctcaaacttctagacagccatagtggcatgggcaatggaggtggcatgggtgatgaaatgctcttccaagtctcaagtagtcttctgagtcccaattgtgttggcaatggttgcaatgggctgtgtaggccagtctctaagccagttgttggaacttgcaggtaaaagcaatataaggtggtagccagtaggtgtttacacccaacctcaatacccccaaaagacagacttggttgtcccaattggtagattaggttggggaaccn

SEQ ID NO: 13722 - DNA, 2473 bp, Homo sapiens
  misc_feature 2469, 2470, 2471, 2472, 2473: n = A,T,C or G
cgtccgcagtttgttgaagttcgtgactgcttcactctctcattcttagcttgaatttggaaatgacttttgatgacctaaagatccagactgtgaaggaccagcctgatgagaagtcaaatggaaaaaaagctaaaggtcttcagtttctttactctccatggtggtgcctggctgctgcgactctaggggtcctttgcctgggattagtagtgaccattatggtgctgggcatgcaattatcccaggtgtctgacctcctaacacaagagcaagcaaacctaactcaccagaaaaagaaactggagggacagatctcagcccggcaacaagcagaagaagcttcacaggagtcagaaaacgaactcaaggaaatgatagaaacccttgctcggaagctgaatgagaaatccaaagagcaaatggaacttcaccaccagaatctgaatctccaagaaacactgaagagagtagcaaattgttcagctccttgtccgcaagactggatctggcatggagaaaactgttacctattttcctcgggctcatttaactgggaaaagagccaagagaagtgcttgtctttggatgccaagttgctgaaaattaatagcacagctgatctggacttcatccagcaagcaatttcctattccagttttccattctggatggggctgtctcggaggaaccccagctacccatggctctgggaggacggttctcctttgatgccccacttatttagagtccgaggcgctgtctcccagacatacccttcaggtacctgtgcatatatacaacgaggagctgtttatgcggaaaactgcattttagctgccttcagtatatgtcagaagaaggcaaacctaagagcacagtgaatttgaaggctctggaagaaaagaaaaaagtctttgagttttattctggaatttaagctattctttgtcacttgggtgccaaacatgagagcccagaaaactgtcatttagctggctgcagaactcctttgcagaaactggggttccaggtgcctggcacctttatgtcaacatttttgattctagctatctgtattatttcacctagcttgtcccaagcttccctgccagcctgaagtccattttcccctttttattttaaaatttgactcctcttcaagcttgaaaaccctctgaactcagtcttctttacctcattatcaccttcccctcacactcctaaaattgcatgaaagacagaacatggagaacttgctcaagtgcaggcagagagcaaaaaggggaaatatgtctgggaaaaagtgcacgtgaagaaacaaagaaggacagaggccattccgaaatcaagaaactcatgttcttaactttaaaaaaggtatcaatccttggtttttaaactgtggtccatctccagactctaccacttacggacagacagacagacagacacacacacacacacacacacacacacacacattttgggacaagtggggagcccaagaaagtaattagtaagtgagtggtcttttctgtaagctaatccacaacctgttaccacttcctgaatcagttattatttcttcatttttttttctaccagaggacagattaatagatttaacccttcacaacagttcttgttagaatcatgggatgtgtggcccagaggtaagaatagaatttctttccctaaagaacataccttttgtagatgaactcttctcaactctgttttgctatgctataattccgaaacatacaagacaaaaaaaatgaagacactcaatctagaacaaactaagccaggtatgcaaatatcgctgaatagaaacagatggaattagaaatatatcttctatttttaggcttctatttcctttccacccactcttcacaggctattctactttaaaggaagcctttttattttgctgcacacaatctagcaggaatctttttttttttttaagagctgtgtcatccttatgtaggcaagagatgtttgcttttgttaaaagctttattgagatataattaacataaaataaactgaacatatttaaagtgtactatttgataagttttcacaccttgtggagaacatgcatactacaattaagagagtgaacatatccatcatccctcaaagtgtcacaatgctcctcctgatgactcctccccagaaaaccaccaatcggctttcattttgcattttgtagttttatgtgaatggaatcatatagtatgtcttttttttttgtctggcttctttcactttgcataattattttgagattcatatgtctccatcttgatgctcgtatgaattcattcttttaaatgttgaatattcccttgtatggatataccacaattcatttacccatttacttgttgatgacatttgggttgttttagttttgggatattacaaataaagctgctgtgaacatttgtgtannnnn

SEQ ID NO: 13723 - DNA, 394 bp, Homo sapiens
accaaaatcccaagttctagacttgtgctgagttaacagatgtaaaaatagaattgtttttttccccccttttgaagcaagggtctcaccaaaaggctcaaacacgtcctagacataaaggaacaaacagatttaagtcaaggtggagtggaacaatatgcctcattatccacaccataggtctattagcttgtattttttaaagagtttaagcttggcattcaatgaattctttaaatacagagtgtggttataggtttattcatttgttttttcaagaggtccctccttcttccttgaaattccaaagctttcatttcactggaattattggcttctaccacgagtatggtgtatatgccatacatgagggccctcaagtaatagtatgtgt

SEQ ID NO: 13724 - DNA, 474 bp, Homo sapiens
  misc_feature 473, 474: n = A,T,C or G
acttttttttttttttttttttttcaattaacaatataggggatctgaacaagacataccccaaagcaatttctttttaaacttttattaccctataaattcctcaaatatcaaactccatgttacttttttttttagcaattaatgaaaacagttttggagaagaagaaactgaggggagatttgtctctaatacaaaaacttgtttattccaactgcagacagtcttttcataattttatgagccacaaaataagaaacagtttctactctgggtgtcatttgcaaataggagacaatcaagattcaaaagaagcccataagaacagcaggagactctagaaggcacaagatgtgggatagaatcctacaaggagatgatgtacggtgcacctgagaggaaggaaacagagaggtaaatttgttttcaaatatttaatgcctccggattctgaatctaagtatttcctgann

SEQ ID NO: 13725 - DNA, 425 bp, Homo sapiens
  misc_feature 425: n = A,T,C or G
acgcgggcaaactcattagcaaagcacacaaagacctttgtgatgtggtattgctgaattaaactactggcagccctagaaaggtaaagtgtatttgatgcttctgtgctgttcccttagcccagaaagcccttccagtttctgtttagtaaagtcctattcatctttcactactcaatgagtcataagtaatcccattaggaaagcctgtgtgatctacctcctccctaatttgccagcttgagtttgcttcaccccttcataatactcagtcaatcataatgtcttataatccatcatagcacctcacacaatgaactccaatgtctggtttgttgggatgtccgccttactacattgtaagcttcttaagggtagaaaccagttctgataggcttagggcagtgaccaccaacagaaaaagn

SEQ ID NO: 13726 - DNA, 1484 bp, Homo sapiens
  misc_feature 1, 1470, 1471, 1472, 1473, 1474, 1475, 1476, 1477, 1478,1479, 1480, 1481, 1482, 1483, 1484: n = A,T,C or G
ntgtacttatttagagcccagcagaggaagtggtaaaggaaactagctgagtcgttttctgagaagagaccatatttgttcgcagaggaagccgttgctttctgggatctggctacggcagaaaagacatcggctccaacaggggtgttccacagggtagctgggagttggaagagccaagaacgcctccgagctctggatttgagcttctctgcccatgggtgaagcgcccatgctcagcttgtgagcttcttcccgggagagcagccatggcactgaggaatgtgccctttcgctcagaggtcctgggctgggaccccgacagccttgctgactatttcaagaagctcaactataaggactgtgagaaggcagtgaagaagtaccacatcgatggggctcgcttcttgaacctgacagaaaatgacatccagaagttccccaagctccgggtgccgattctcagtaagttaagtcaggaaatcaacaagaacgaagagaggaggagcatcttcacacgcaaaccccaagtcccgcggtttcctgaagagacagaaagccacgaagaggacaatgggggctggtcgtcctttgtgagtatggtgtgggctgttcttgcacctttacagcagtgtccagggcagctttgtgataaggagccaggatggagccaagtgaagcggggctctaacatgatgccagcacacccacccagggcccacaaaaggtgctctgcacagggccagacaggaaatagttttggctttgggagccatgcactctctgtctcagctactcaactctgctactggagcacaaaagctgccacagacaatgagcaaacaaacaggcttggctttgcgcccataaaccttcatttgcaaacacagagggtaggctgcacgtggccctaggctgtactttgctgactgcgcttcacccactgttaccaacccccacccactacccccccgtctccaaaaatggacactcctagaaatctactctcaagtagcttttctcatggacttaagtccccatcggtgacacggagggaaaagaacttcagaaccaactgttggccctgaaaagacctcaaagagggtgcaatccagttgatttttacattgaaaggtcacagttccccctctgagagtctgacggattgtacaacccctccccaggaacctgtatacacagtcaccacccatgaagcagtctcaggctaagaactctattatggaccgtagcccaatctgttcattttacagatgaggcaactgagtccacaggagagcagaacgtgacgtgcgtagaacacaaagttagttagaggcagacctaggacccaggtaaccagaccctcagtcacgtgggccttctggtaagaggccacctctagtgccttcagaaggcagaaacaaactgtcccttgacctattgggattctggtaaaagaaagtatttaannnnnnnnnnnnnnn

SEQ ID NO: 13727 - DNA, 1946 bp, Homo sapiens
  misc_feature 1, 2, 1946: n = A,T,C or G
nnccgaagaggctttgtgaactgcctgctgaatggaaggaaagcaactttaaaacatttagagttttgctgagtatagccaaatgcctgttctgaaacttataggaaattggaattttgtttaaaattttacactttaaggtagcaaatgtcaattattagaccgagcatattgtgaagaattaaactaaaattaatacgtacagttttctctaattaggtgactgttcataatgggtatatttggaatttagaagaaataattttgtagtaattgtggcccttatgtttaacagataattcagcattggcgtatttgcttgtcccaatacaagaatgccaaaggaggaaacaggaaaaattgccgtccattttaaaaatttaggtttgttgttttaaaccataattgttctcagaacttttttggaacttctaattttgggtcatttaatttaagaatgagagtcatgatgttttgatttatgaaggtgaatttaatgcaaaagtgggtaacactacattcatagcaaagttttttattaaattttataaatttttaatagccaattatgtcctaattgtattttggggaatgaacagcagcaaatactgtaaatgtacagttttctttttttttttttttggttatgtatacaaaagttttaactactttttggtgtttatgaaaatcatttagttgacaaggtgcctatgccattgttaaattttctttaagtaatttaacaacagatttgctaatttaaaaaaaaatgaaaaaaaaaatcttaccagcagtttgtaaaggtctggaatcacagttggcatcctttattcaggtctcttctctccaacgtacacttaaaattggtgccgagcagggatataacctgcagttaagtgaaaagaaaatccagcctccccctccaaaaaaaaaaaaaaaatttaatttttaaaaattagtggtatggcaataagacacttcagaggctatcttaacctctgaatacccatcttctagtttaaagacagagacatcccatctggaaaatgttaacttgtgttgccatctcgttgccggagtaagtagacataagacagagtttaagaagtaaaaatatagaaaaattttgatggtcacaatgagataaatattagaatattactattccaatgattaaatgaggatcttgaaataaattctgaagtcttccaatttttacatttattggaggggtccctgagttctgtcaacttttttatttaagtctcttgctcttattttgtgcataaatgttaaaccttccaaaaatgaaatgttagctttctttcttttactttttattaaatttaatagaaaatatgacctgagtagttaaaaagtattttgcattatttgcagtaagatgtctctagcactgctcaaagggcaaattttaaaacttcagtctgggtgaaagatttgctagttttacagaaagatttgctatcttaaactcaagctggtttttctgttctcatgtaagtgactgggatgctgtcttatgaattcttccaaggtcatgtttgtgaaataaacattacatgagagctttcctgtcatctacactatatgttgtctggagtgttgaacaaatttattttagtttctaagttgtaatctatcctcatatggtctatacgattttgaatgtgtgccactacatactgagatgataatgctgtacaattttaagtggtagcagtttctgtatgcagtaggctgaaatattttgatgaactgcttaatttttggattttattttttaagttgtataatttattttcttgcaaaataaaaatgtaatataaaagcttttaaaaaattaacacttgggcggccaaaaaaaaaaggagcaaacggcagagagggggttccaaaaccggggggtgaaagagtggttgtaagcn

SEQ ID NO: 13728 - DNA, 1391 bp, Homo sapiens
  misc_feature 1, 2, 3, 4, 5, 1391: n = A,T,C or G
nnnnngatgaaacagaaaggaggaaggtaactctagttctttctgaggcatccgacactcctttagaagggttttcccaggaagcctcattcactttcaggtaagcccattatgaagggataaggattttaccgtattccactggaataggggaaaaaaccatctcactttaacagaaagcatgcaagtgcccttttctggaggaggtgggaatgagggagtacacagactttagcttaaactgtggcaggagggtcttaattttggcagaacagggcatggtgttgcatctcacctgttccacgcttagtacaagcccttcttcccagtccctgtcacctgcctcattttgagctttcactgtattttcctgttgttccagggaagatgaagtgcatttaaatgctgcagttggatactgtgaagatgagaccccttagcctgtgggattaactttccatggagcccattctggagagacttgagagagcacctttaaaaggaagttagctaagatactgccctccgtttcagacagaggttggaaccagatcctggctgagagcagagaccagcttccactcagccatgcaccctaggagtggggattcagctctgtggctccaggaaggttaatcttcaatgttaatccgtttagataaagttgttagttaaaaggtaatctgtttagcctccctttccccattctcctgccagaaaagagggagttcaagtcttctttccaggactcctgtgttttggctgagactgattcttcactgtggccttgggagaaaagctgcctaaccagttctgggccctggctagttacaaccatgtgtgagttgtttacagtacgcacaggtatgggctgaagggaaacaaagcttaagggatgactagaaaggcttgctgaaattgctatgggagggccccaccctccaagccatctcccctcacaccccgctcggtttcagtttctgcagcttggttatgcgacattctcttaatccttttttgaatctggtctctacttaagcactcaagaaaactgctccacaaggattgttttagtggggttttaattttttaaaatgttcttgtttatttaaattgcttgaacaagggtttagctgtatgggaagagttcctgcctttagctatacatgtttccacccacttagacatgctgctcacccacagactcatacagcctccacagacacaaagcttctgtgtatcctacatgtacctgcaccccaattctgtcaacctccccacagctcttgactggctgtttatctattccattccactaccttcccaccccagccctcaaagtcccaaacagattgaaaaaaaaaaaaaaaaaattcctgcggccgcaagcn

SEQ ID NO: 13729 - DNA, 2431 bp, Homo sapiens
  misc_feature 1, 2, 3, 2431: n = A,T,C or G
nnnaacaaaaaatacggcgaatacaaattattaacgctacaatttgccatttggcattcaaggctgcgcactgttgggaagggcgatcagttcagggcctttcagctattacgcatgctggcgaaagggggatgtgctgcaaggcgattaagttgggtacgcagggggtttcccagtcacgacgttgtaaatcgtcggccagtgaatcttattttttgtggattagattttaatgtgaattttggaagtacacaaaatgttcaaactatagcatgtatatatatcaagttggcagtataaactacttgcaagtaactttagaacacaagtgtttgcccattggtagtgagatggattctaagttgagatattagctagaacattccagttggtaagttgtcatacatatttaagaaatatgaatccaaactagattgtgataattccctcataacttcacctccacctgagtttcggactctgctatccagctgcgtactagtcttcatcagatgacacaggcatctccaacaccgcatgactggaacctgaactcgcttatcttctgtttcccctaaatttgttctttttccaaattttctatcttggagttgccctcttggaattgccctctaccatctatctagacacttttatcaggaacccagagaaccatctttacctcttagatataatcagtcttgtaagtcttgcccaattttctttcctaaaactttaaaaatctgtcctctctcctctactaataccacaatgttagttcaggccttcatcttcctcaacaactaagacatcctcctaactggttgtcttgcctgtagctttttcctctcatggccatctgccacacagctgtcacttacctgtattacaaactgatgatgtcattcctgtgcttaaaactctgtaatacctggtatgtcagtcttaattccttcacatgatttgtgagatcctccacaatacgggccttgtcttgtgcttcatatttctgatctactgaagtgactgtggttctctgatgctacagagtgcctttgcttctttgtgcttttgttccctctgtgtgcagaaaaaaatctcacccctcacctcctgatttattaagttctccaggaatattttcctgatgttaagtaggtacttccattcagtatgtatatttttatcactgggctgatgatcacactgttgagttactgaatgagaactttgtgctacccttactcatttctgttatggattaaataaacataaaaatagggaatatatactgttccaacaaacttttcctctttagatggagactttcaaggacttaaagaggcataatttgttttaaagtcccttaaggatggacaagaaaacacttagtggttcttttgttcagccatcacaagaagaagtggagcattagataatccagaacagcagccttgctatccaatctgtttatctaacaataatagttaaggggagctctgcaggtcagcaaagctagtccaggattacaaactgccatacatgagctacatgtcaattagttggattatgtataagatagcattttatgaaataatgctcttaatacaaaaacccctatatgttactaaaagattaaacttaaaaggagggtataaaaaacattcacagaaaatatttattatgctactctttgtactatgtatgggaacagtatgtttgttaagtccaagagaaaagataattcactgacatgaaacacccaaatgtcttcattttaaaagtagtttagagatagcatcaggtaggccaaacaactgtactgggcccctgtagagattagggtttggtctattaaaaaaaatctttgcttgctggaactgcaagcttggcttccctgcaagctcaataggttctggagctcatttaccatgtcgctcgctggatcccagaaagttgcccatggtcagctaagtgacggaagactatacgactaagcctccagcgccgcttcacaccacgcggacgggacgtcataacacaccgatttctgattctaacaggacagctatcccgggggagggcagcaatttcttcatcagccacatcctgaagaatttttggcaaaatggtattcttcctgagtgaattaatacgtagcctctcatctgcgtattcataggccatttttcgtctcttcacatcgcgccacattctccagtctacatagtgacttcgaacttggcctgaagctgatgaaggaaccatctgcttgaacgtccgcagcagcgagcccagcatgaaggccgccatgttgtccgctacaaactacccccggggctcgagggccaaattccctatagtgaaggcgtattaaattcgtaatcatgtaataactgtttcctgtgtgaaattgttattccgctccaan

SEQ ID NO: 13730 - DNA, 1453 bp, Homo sapiens
  misc_feature 1, 2, 3, 4, 1425, 1426, 1427, 1428, 1429, 1430, 1431, 1432,1433, 1434, 1435, 1436, 1437, 1438, 1439, 1440, 1441, 1442,1443, 1444, 1445, 1446, 1447, 1448, 1449, 1450, 1451, 1452,1453: n = A,T,C or G
nnnncgcggccgcgtcgactacggctgcgagaagacgacagaaggggggtgtctttcccagtgctatctgcaggctggccagcttcctctgcgctccggaaagctgcggcccagcgcggactagtgaggacctccacagctcctgacattgccaggagtcctgtcggcgttttctcccagcctccgccatgccggcggtgctgggttttgaaggcagcgccaataagattggcgtgggcgtggtgcgggatggcaaggtgctggcgaacccgcggcggacttacgtcacgcctcctggcacaggattccttccaggtgatacagccaggcatcaccgagctgttatcctagacctgctgcaggaggcactaacagagtctggattaacctcccaggatatcgactgcattgcatacaccaagggccctggcatgggtgccccactggtttctgtggctgttgtggcccgtactgtggcccagctgtggaataagccattggtgggtgtgaaccactgtataggccacattgagatgggccgcctcatcactggagccaccagcccaaccgtgttgtatgtgagtggaggaaatacgcaggtgattgcatactcggaacatcgttaccgtatctttggggaaaccatcgatattgcagtgggtaattgtctggatcgttttgctcgagtgctgaagatttctaacgacccaagtccaggatacaacattgaacagatggcaaagcgaggcaagaagctggttgagctgccatacactgtaaaggggatggacgtctcattctcagggatcctgtctttcattgaggatgtagcccatcggatgctggccacaggcgagtgtactcctgaggatctgtgtttctccctgcaggaaactgtgtttgcaatgctggtagagatcacagagcgagccatggcacattgtggctcccaggaggccctcattgtgggaggagtggggtgtaatgtgaggctacaggagatgatggcaacaatgtgccaggaacgtggagcccggctttttgctacagatgagagattctgtattgacaatggagcgatgatagcccaggctggctgggagatgtttcgggctggacacaggaccccactcagtgattctggggttacacagaggtatcggacagatgaagtagaggtgacctggagggactaataagatcaacagaatcagagtagatagttccttaatcggaacccaaaggaccccgtgcctcaatctctatcctgatgtcatgggagtcctagcaaagctatagactccaagcaaggcttggggtcctttatggaaccccaggatgactcagcaataaaatatttttggttttatggttttaaaaaaaaaaaaaaaaaaaaaaaaaaaaaaaaaaaaaaaaaaaaaaaannnnnnnnnnnnnnnnnnnnnnnnnnnnn

SEQ ID NO: 13731 - DNA, 2202 bp, Homo sapiens
  misc_feature 1, 2, 2158, 2159, 2160, 2161, 2162, 2163, 2164, 2165, 2166,2167, 2168, 2169, 2170, 2171, 2172, 2173, 2174, 2175, 2176,2177, 2178, 2179, 2180, 2181, 2182, 2183, 2184, 2185, 2186,2187, 2188, 2189, 2190, 2191, 2192, 2193, 2194, 2195: n = A,T,C or G
  misc_feature 2196, 2197, 2198, 2199, 2200, 2201, 2202: n = A,T,C or G
nngcgtccgcccatcgcggtcgcgtggggaccagcccagatccagtggcccggaggggcctgagctaaatccgcaggacctgggtaacacgagggagggctccggatatctttggtgacttgtccactccagtgtggcatcatgtggcagctgctcctcccaactgctctgctacttctagtttcagctggcatgcggactgaagatctcccaaaggctgtggtgttcctggagcctcaatggtacagggtgctcgagaaggacagtgtgactctgaagtgccagggagcctactcccctgaggacaattccacacagtggtttcacaatgagagcctcatctcaagccaggcctcgagctacttcattgacgctgccacagtcgacgacagtggagagtacaggtgccagacaaacctctccaccctcagtgacccggtgcagctagaagtccatatcggctggctgttgctccaggcccctcggtgggtgttcaaggaggaagaccctattcacctgaggtgtcacagctggaagaacactgctctgcataaggtcacatatttacagaatggcaaaggcaggaagtattttcatcataattctgacttctacattccaaaagccacactcaaagacagcggctcctacttctgcagggggcttgttgggagtaaaaatgtgtcttcagagactgtgaacatcaccatcactcaaggtttggcagtgtcaaccatctcatcattctttccacctgggtaccaagtctctttctgcttggtgatggtactcctttttgcagtggacacaggactatatttctctgtgaagacaaacattcgaagctcaacaagagactggaaggaccataaatttaaatggagaaaggaccctcaagacaaatgacccccatcccatgggggtaataagagcagtagcagcagcatctctgaacatttctctggatttgcaaccccatcatcctcaggcctctctacaagcagcaggaaacatagaactcagagccagatcccttatccaactctcgacttttccttggtctccagtggaagggaaaagcccatgatcttcaagcagggaagccccagtgagtagctgcattcctagaaattgaagtttcagagctacacaaacactttttctgtcccaaccgttccctcacagcaaagcaacaatacaggctagggatggtaatcctttaaacatacaaaaattgctcgtgttataaattacccagtttagaggggaaaaaaaaacaattattcctaaataaatggataagtagaattaatggttgaggcaggaccatacagagtgtgggaactgctggggatctagggaattcagtgggaccaatgaaagcatggctgagaaatagcaggtagtccaggatagtctaagggaggtgttcccatctgagcccagagataagggtgtcttcctagaacattagccgtagtggaattaacaggaaatcatgagggtgacgtagaattgagtcttccaggggactctatcagaactggaccatctccaagtatataacgatgagtcctcttaatgctaggagtagaaaatggtcctaggaaggggactgaggattgcggtggggggtggggtggaaaagaaagtacagaacaaaccctgtgtcactgtcccaagttgctaagtgaacagaactatctcagcatcagaatgagaaagcctgagaagaaagaaccaaccacaagcacacaggaaggaaagcgcaggaggtgaaaatgctttcttggccagggtagtaagaattagaggttaatgcagggactgtaaaaccaccttttctgcttcaatatctaattcctgtgtagctttgttcattgcatttattaaacaaatgttgtataaccaatactaaatgtactactgagcttcgctgagttaagttatgaaactttcaaatccttcatcatgtcagttccaatgaggtggggatggagaagacaattgttgcttatgaaagaaagctttagctgtctctgttttgtaagctttaagcgcaacatttcttggttccaataaagcattttacaagatcttgcatgctactcttagatagaagatgggaaaaccatggtaataaaatatgaatgataannnnnnnnnnnnnnnnnnnnnnnnnnnnnnnnnnnnnnnnnnnnn

SEQ ID NO: 13732 - DNA, 377 bp, Homo sapiens
  misc_feature 374, 375, 376, 377: n = A,T,C or G
actttattttttttttttttttttccctctattttgtttcattttttcatttcttttcattttttcattttttcttgtccttttctttttatagatgctgaataaatatctgtagaatgagcaaatgattatattctatagaatgaaatatctgtagaatgagcaaatcactattgaaaaatgatttgggcatggaaatccaggagcacagtgattcaacagatgattattgtcttgctttaatgaatccttctttatccattgcttttagaagcaatgggggaaataatccacaagtcattcagacaaagcactatttagttatacgcacagcttaaagataatgtgaccattggcattttactggtaataannnn

SEQ ID NO: 13733 - DNA, 447 bp, Homo sapiens
  misc_feature 446, 447: n = A,T,C or G
acttttttttttttttttttttttttttgctttgctttttaagtgctactgtagaacccaagacaatttacatttcaaaccaaattgagatgtggaaaaaatagacagaaggaaatacagctctagagtgtgtgtgtgggagaaagcacttcaagtatttattctacagccaactgagaaaaacaatcaattatacataagccaacttcatagttcaggtatctcaatcttaaattataatactaaactaatgatttccctagtctcctaacttattcagtataatgaattgcattcagttgtaaaatgtaaaattcaaagaaatgcaattaaggtaggtaaagagaacggttactttcaatctaaaatgcttttttttttaattattttttgagctttcaaaagtactctatggaaattaaaaaaaaaaaaattgaaaagtaccnn

SEQ ID NO: 13734 - DNA, 389 bp, Homo sapiens
  misc_feature 388, 389: n = A,T,C or G
actaccggacctgtttcatctctgcttcccaagcctcacgcctgggcctcacggattctctccagcgcataccttaggctacagctatagggcagctgtggtgagggaacgtccctattcagaatcgttggtcaaaaagcacatcacttctgtccctttcttgcagaactggttgctgctctggaatgaaagtttgattggtctgttagccacgcccacctggatttgggaaagccaatagaaagaatcttctgctctcctatctgctgttgctttttaacctgtagcctagaaaatggcattatactgaacaaatacggtatgaacagaccttagacaatgctggaactggcgccggataagctcatgagtccatgctgtgctacann

SEQ ID NO: 13735 - DNA, 829 bp, Homo sapiens
  misc_feature 1, 828, 829: n = A,T,C or G
natgcgcttagctccacaacttctttctccatgtggatatagcatttttccaacttgcatatgatgatgccattctactatgcattgcccttgtcaaatgaaacaatgatgtccatagtggaagtcaaaagttaatgggaagtctgttttgtaggaaacctgaaaacattttttcatgaagcttatcctgtataataatataacatgatgcagctttaatagactaaatctaaccttgacttcttaagttcaacttcattccgtgcttctcagcctcttgttacaattaatgcccattaactggtaacttctgaaactaaccgagaggcttttggaatactgtatttaatctctgccctacagcacaagcagcgctgccctgtgctggaggaccagttggtggatctggttgtttatgccatggagcgatctgagaccgaggagaagtttggcgatgggggaacaagccaactcctgtggcagcatctctcaagtcagctcattttctttgtgcttttccagtttgcaagttttccacatatggtgctttctcttcatcagaaggtatgtactaaatcttatggtcggagtgacttcacctgttgattactgtattttagactgctgtgggcattccctagtgattttagaactgacagaagttctgagccctaatttctgtcctgtttagtgcttttatagtttcttaactttttactttcttgtcacctgtaaaaacaggattcagtcattcattctatgtattctcagtgcaggcaccagcagatacaagatgaaaaggcactgtatatcctcagtctaggaggnn

SEQ ID NO: 13736 - DNA, 504 bp, Homo sapiens
  misc_feature 1: n = A,T,C or G
nttctatgattccctaatagaacctgaatacacatcacaggaaaaacagttaataaaggagcaaggaggtcaaaaatgaggattctgatgatatatgggatcaaaattatatctccctcaaacagctcaatgaaaagttacaaaaaccctgcataactcttaccatatggtgagagaggccactctgggtatggtcaacaggcccttcattgggcctaacttggccttggcagttaagcaggtcttccaagcctgttcagtatgtgtattcaacaatccaggaagcaaagtacctgcccgggcggccgaggtacgtgggcctgtctgcaaacccagtgtgccgtgccagccaaggacagggtggactgcggctacccccatgtcacccccaaggagtgcaacaaccggggctgctgctttgactccaggatccctggagtgccttggtgtttcaagcccctgcaggaagcagaatgcaccttctgaggcacctccagctgcccc

SEQ ID NO: 13737 - DNA, 221 bp, Homo sapiens
  misc_feature 1: n = A,T,C or G
nacttttttatagaagcccaactggactgacagatgtcaaggggttgggggatcctcagtaggctaacctagcagagttcttgctaaaactgggctagacaggccacagacaagatagccaaaatcaaagcctagttgagaagggaattcagaggagcatgactaaaatttggtcaaggggagagtctttgtcaccccagcacctagcacaagtggttggt

SEQ ID NO: 13738 - DNA, 281 bp, Homo sapiens
  misc_feature 281: n = A,T,C or G
acgcgggagaatagaaaatttcaggcagcagtttcacacgactagcaaaaggaatctattgaaatagctgcagctagggaccgataagaccctgaaaacccgggagtagatccagctggctaagaccaactggttcccacatggcactggatttgacctaggtttcacctagaacctcattatatgctcattaacatacaaaaatcacacacctaccagtattatgacagtttcaggaacatccatatttagtgtaaaactgggtgacaggccgggtgccn

SEQ ID NO: 13739 - DNA, 521 bp, Homo sapiens
  misc_feature 520, 521: n = A,T,C or G
acagtggagagaaagcctacattcagggcctcaaggagaagtttccacaggaggaagctatcattgacaagtatataaagctggttaaggtaacatggacatgctgaggacccagagtttgttctcgataaggctgggtttctttattattagtggaggcactgggggtggagagtgcagtgcgggaggcaggaagggaggaagagtcacatctgttcttagctcagcctccacccaagtccatccagttctctgtctctctctctctggagccttggctccacggctgctgctgtcaccctggcctctggggatgccctgctctcctccctgactaggctggcttccatgacatcagatcactactcctttttactgcatccgagaccagattgggatttttgaaaaggaatttgagcaggaaaattaaaagcaaaaaaaggactcatccgagtgtaggatgggaaaaattcacagagtatagattttttaaaaatattcaaattcagcaaagttcagnn

SEQ ID NO: 13740 - DNA, 1590 bp, Homo sapiens
  misc_feature 1, 2, 3, 1575, 1576, 1577, 1578, 1579, 1580, 1581, 1582,1583, 1584, 1585, 1586, 1587, 1588, 1589, 1590: n = A,T,C or G
nnnccgtaatttaaaagtttgacccaaaaattacatcaaaattaggcagtattcggtgtttagcctccatctgccttgtcttcttgtctttagttgtgcaagtagatgctgatgatttctggcagagctaaagtaagtaaatcatgtgaatttattttttttcctcataaaacagatggcatggtctagctctgggcttgtatgtttcatgaagtacatgggtctgagtgcgtatttattttgtgagccaaggtttatgccttcttctataattttctttcaccgaaaattacctggagagctagaaactccatttttgtcagtgtaagaagctttagaatctatatccagaccaaggccatggaacaatgtagattcactcagtaaaaactcactagcggccttctttgtactagtctgtcacctttgcttggctttgggaagcttcaaactagggcagtttatgtttgggagtgaccagtcaaatagcaagacagacataggcaaggatgtaatttttaaaaatttaagtggggaatggtgaagcatgaatcaaaacagaaggtagtcttaccttcttggaactgtaaaataaatacatttgaaaaaggcaccctctcaaccttctgcgagtcagaatttttgctgccacccctcattttgaatctctattctgcattttttattcttttttttaggaaggaggaagaaaaatttctcctgaagaattcattggaaattaaaattaacttgcgtattttgtattctttggaatgtgatgaagactgatttgaaagggcagtgctggatttggtcaggcataggaaaggaagacatgcagtcgtcctgcctagctcatccccgccacgatggagaagtggggttgctttcgttgtactttttttcatttgtttcttgccaagcccagtggcttctgttataacatgtggcagcttctcccttggagactgattcagtccaagttaccataatatttaggaccagctacagagacgtttcttcccctaaacccatgccaaatctaaatcaaactatcttcttctccttagccgttcaaatagctccagctcttatataaaaatacgagaaatacacaggcctcttttcgttttattcctgttcaaacagataaacaaacaaggcacatcatgcctaggttgctttgagcttgatcacttcctcctaaagcagtcttacgctgtgttgattttaagaattgcaacttaggtgttctagaacatattctgagagcatagtcatagtctgtgatctcagaatatgtttgcttccttctagaacatctgagttctagaaattgcgtacaataaactgctgtcagtgctgctggaggaaggaagagtaactctgacatcactggccttcaacaggtgtggcgctgagcttctgggcctcagaagccctgacttctagaggctgggggccagcggggcagggaggtgatctcatcatggatggccacagatcatccacctgccaaacagttaaccctgaacaagtcatgtcaatttattttgcttttaaaaaagaaagtcnnnnnnnnnnnnnnnn

SEQ ID NO: 13741 - DNA, 579 bp, Homo sapiens
  misc_feature 1, 2, 3, 4, 5, 6, 7, 8, 9, 10: n = A,T,C or G
nnnnnnnnnnccgcccgggcagcgactctggggcatttatcttcactctgatgagggctcagacttgataacgcccgtggtgccccatccctataggagctggtgagattgcagcctgctgcctcccctccatcagccacagctattggatttcccacccagaatctttaggtaaatgaggtaagtcctgatttttaaaacttcttttgaatctggaatccaaacacctgagtggaaagagaagcctgctttaaactggacagatgaaactagaacagactcttggagacggctggcaggaagtgaagctcaccttacctgggcttacctcactgggtcaaatcagaattttattttggagggcaggttggctactttggatattatctgtgaatttcctgcattgtctggacttctaatctctgtgaatttaaaagccccctcgtttccctatgcctgggtggcaaaaccattcccctgggttgaattcttctggaacaaataggcagctagagataggtggctctgatatagctcagagaagaagtggttggctaagtagctgttagggctcagagt

SEQ ID NO: 13742 - DNA, 3066 bp, Homo sapiens
  misc_feature 1, 2, 3, 4, 5, 6, 7, 8, 9, 10, 11, 12, 13, 14, 15, 16, 17,18, 19, 69, 70, 71, 72, 73, 74, 75, 76, 77, 78, 79, 80,81, 82, 3063, 3064, 3065, 3066: n = A,T,C or G
nnnnnnnnnnnnnnnnnnnccagttatgctgctcccatgatagttcttttatttgtcatagttcatcgnnnnnnnnnnnnnnatcgatacgacttttttttttttttttattttttttttttatcgggagaaggtgacgtgacatctctttattggttcagtctatgcctggcccagcggcagccccaggtccagggggggtctggttggaggtctctggacagtcaggggcagcatcagcagaaaccctgggtgtcggggggctgtgggagtagcagcactggtccccgcgttgacaggtgccctccttaaacctcttgcaaggaaatgtcttgagccgggcagcccgctgggccacatcttccggcggctccttccgcttgttctgaagcagcctgcgtctctcctccatagcttcgtcggccgccttgcccctgtgcgaggggaggagtaggtgggaccccatctgccctttaccccttctttccctggctgagccccacccccaccttaccaccactcaccctggccgggcacgaggccggggaccccagttggcctccgggttagcctggaagcgcttgagtcctcgctgtcgggagctggggttggcatcttcccggatggtgaagttggcctgcagcctgggctccacactgagaatgcggaacgctgggctagtctctgatagtcgctcccgtttcaccggacattccttctcccagcaacgcatgatgtcccagagggcagaggcaggggcatccgtcttcacagcgttcttacaggcgtgggagagtgagacccggaagtcagcgtggaggagggcagacagggcgtgttcgctgttcagtgccggtgttgcagggagtgagggcagctggagtgcgttctgccgaagcttgtggttgcacgcccatcgtcttaggggctaccttccgtgaccatgtccaagtctctgaagaagttggtggaggagagccgggagaagaaccagcccgaggtggacatgagtgaccggggcatctccaacatgctggatgtcaacggcctctttaccttatcccatatcacacaactggtcctcagccataacaagctaacaatggtgccaccgaacatcgcagaactgaagaatttggaggtgctcaacttttttaataaccaaatcgaggagctgcccacacagatcagtagccttcagaaactcaaacacctgaaccttggcatgaacaggctgaacactttgccacgaggcttcggctccctgccagctcttgaggttctggacttgacgtacaacaacttgagcgaaaattctcttcctggaaacttcttctacctgaccaccctgcgtgcactctatctaagtgacaacgattttgaaatcctgccgccagatattgggaagctcacaaagttgcagatactcagccttagggataacgacctgatctcgctgcctaaggaaatcggggagcttacccagcttaaagagctccacattcaggggaaccgcctcaccgttctgcccccagaactaggaaacttggatttaactggccagaagcaggtattcaaagcagagaacaatccctgggtgacccccattgcagaccagttccagcttggcgtgtcccatgtttttgagtatatccgttctgagacatacaaatacctctacggcagacacatgcaggccaacccagaaccaccgaagaagaataatgacaaatcgaaaaagatcagccggaaacccctggcagccaagaacagataaggaagggattggcatcggctggccttccagcaccttctctctccaacacttcattctctcttgccctgtctctcaaataaacccaatgctgcgtgtgaggccttttttatttttcttttcactctctttctaatgcttcccaccttaccttttagattcttttgctaggtgggagattgttataaggtctttaaaccatttccatttgtttctttaacattaccaaaagcagggaacaaagctcttattcaactgcgaattccatagtgggctctggcttttcttgaatagatatcacaaggttgcttattatcaaaagaataattaaaatcatgtaaccatttaaatgtcactgttaacacttttcactctttctgttgattcacctaactcattattttgctttattaaaagtcttccttcaccaccgagatatgctaatttaacttacaaatgattttaataaaatcttgagtttgtatcacatgttacttattgactcagaataaaagaacagtctgatcttggggtataacacattttcatttacttttctcccccaaaatcatcttatccaattttattggttatacatgataaacttttcatgaaagaaatgcaaaattaaatcacagttcgtttcttctcacattaatttgtcaagttttttttttctttgaagactttctaaattaggaagcagaaaaacaaatctctaggagattctgccaaaggattttggaaagtagcattccttcgccgaagaaatggtgatttctgccaggggctggtagacaagaactgtgaaagagagagagaaaaaacctcaactgtgtattttgtcacggcggaaaatctgctcgcatcgaagcattcttctaagcgacttcgatgccaaggaagttgtgtaaatgtgcacgcgctacaccacacccagggtggaaaccacagttgcagagtcattaaacaatcaattgtttgtttaacatctgtgataggcagctttccttcttttcaacagtgatacctacgaaaatcaaaataaatgcaagctgaggttttgggctcgctgaaaggccccagagcgaacaaaaatgttttaagattcccgtttcaagccggaagaagacgtgaaaggcaccctccgagtctctgagtcagaggggcccacaggcagggaaactcggtactgccacagacacaagaccggctaaagacacaacacgtgtgtaacagtcaggagactactcaaaagggcgccgttatattcatgtgcactattagannnn

SEQ ID NO: 13743 - DNA, 203 bp, Homo sapiens
  misc_feature 195, 196, 197, 198, 199, 200, 201, 202, 203: n = A,T,C or G
actttttatgcctcaattatatcacctatcaaagagcctgctttgtatgatggtcgtgtttgtcttcccatttgagttggtttcctgctgaaattggaccatagacattctcagcctggagtgggaggtgagttgggataggcgaggtcaagtcagcctgcaagaagctttgctccttgaagggactactttacnnnnnnnnn

SEQ ID NO: 13744 - DNA, 1241 bp, Homo sapiens
  misc_feature 1, 2, 1215, 1216, 1217, 1218, 1219, 1220, 1221, 1222, 1223,1224, 1225, 1226, 1227, 1228, 1229, 1230, 1231, 1232, 1233,1234, 1235, 1236, 1237, 1238, 1239, 1240, 1241: n = A,T,C or G
nnagtcgaccacgcgtccgaaagatggccagctagagattcagcatctccaggatcctcatgtgcctctcctcaaagctccctcccatctgtaggagattagtgaggcaaggtgctgctcagagaggaggacctcattgttcttaggaccttggccagttgttctcaaagtgtggtacctggatcagcagtatcactatcacttgggctagttcgagatccagatcctggatccataccccatacctactgaattagaaactctaggggatgaatagtggtgttctctgttgctaagtgacagtgggcccagccacctattttaacaagccctcccagtgattgtgatacatactaaagtttgagaaccattgtactaggccattccagctgaatctcaaacagaaggcagtaatgagagcctacaaatgggagggacctaagtgcctacctactcgctaatcgcaggtgcaaacacacaaggagtttggtgggcttaaggtcagaggagtgtgtagggagggatgtatgtggaaggtaagattcagggcaagctaaaaatccgatactgcaacgttttccaaaatcccagaaggcaaactgtgcatgttctaccctgaaccacccaagcaacactttctaccttgccttatttttaattggattcactgtccaaaatgcagaggtttgctttgcttttttttcagaagttccaaacagcaactttgagagcagtggggtgcttggcagctgttctgtgttttccaggaatccaactgagcattgaaatctctcatttgccgacttatttttataggaagccaattaaaaaaaaaaaaagttttcttatagtattggaactacttctaattttaaaatgacttttttgatgtattttttgttaaatactatgtagtgtaatgtataattgctcttgtttattgcttttacaatcatatttattaaacagataatgtctctaaagtctttgcctcaggtatttttttttttaatcctaaacccttggtgttcattctaaatatagaagtgttgcatgtataggatttcataaaggctaattgcataagaaagagtaaacaccacaggcttgaggtttttggctgttttttactaacaaggcagaatgtatgtactacctgaattctacctgcatttcaattaactatacaatgtctgtttattaaattactttgannnnnnnnnnnnnnnnnnnnnnnnnnn

SEQ ID NO: 13745 - DNA, 1427 bp, Homo sapiens
  misc_feature 1, 2, 3, 4, 5, 6, 7, 8, 9, 10, 11, 1401, 1402, 1403, 1404,1405, 1406, 1407, 1408, 1409, 1410, 1411, 1412, 1413, 1414,1415, 1416, 1417, 1418, 1419, 1420, 1421, 1422, 1423, 1424,1425, 1426, 1427: n = A,T,C or G
nnnnnnnnnnnaaaagatagatttagttattgtattttggtctacaattttggacttggcagtttgttttactaatgcagaattattctttttgtttcaaacatagtttgccatcatctggctactacctaatcatgttgtactagttattgtggaaagaaaattgtacatacatttccttgtcctttgggagatgtctttgagtcaaacccacaagcatgaactctcacctgaaagaaaactggaaaaggagaaactttaaatcagtatgttttgaaaggaagagatttccagactttttaaagcaaaattggaatcgttttatttttttgtttgggccttaggcacaatagaagcaaatgttgcaatattaaatataatagggagagttcactgtttcctgggacattgtggtcatgtccttaatccttcattgtgatgccccttcttggagttggcattttgtgacaattcatagagatcttgcagcaatatttggctattggttttattaacttaaaattcaacagaaatggagtaattaaaaaaaaaacaaaaaacagagaagaattgcaaaatctgaagtggaatggcacttccttgggtatgtaagggttgtttttagataaaactcccgatttgttcttcctacactttaatagtctcaaattctttctggggaagcaacgtcagtgtctacctccacagtaactatgatataggaaattgtcctttcagtggtttctaggtataacaaacaagccgttaaaaatgagtgaccattttgtaggttacagcctcagcaatctgtgtcatttgaaagcaaatatcctgatatttttaaataaggtgagcagggcaggcaggaaaccaatatttagtacttttgtgattaaacattctagaccaggcttgttgatatgtatgccaatagcctagaatttttggcttagtgtaaaataaaaatgtcttttctattgtggtctgatatccgtttctgtaataagatcagtttgttgtcctctgtgcaccagtggttttgcccttaattttttttggctagcatcaccaagatctgtcatccagagctgctgagaaaaatacatgttgccaaacttttcttaaaattgtgctgccagtggtattttcccagatgtgaaaaataataatctaataaaggattaatatctaataacaataccattgttgaacatgctcatggaatgtccaccttcttctgattcctttttttgtatttgaaaatgcaatggtgtgttccaaattattgttggtgttgttaatgtcatgactctcctttgaatagaataaaataaccccttttgttttgtgttttctactgaattagattttcctctagtcctatgtgaataaaaagctaannnnnnnnnnnnnnnnnnnnnnnnnnn

SEQ ID NO: 13746 - DNA, 676 bp, Homo sapiens
  misc_feature 604, 670, 671, 672, 673, 674, 675, 676: n = A,T,C or G
accactgcagttacagtggcagaggagttttcagttgcctcttggagcttcacctcaaagaaatacaaggatcctgctaacgggaatgttcagctgggtgtggctgaatattcatccagggaccctgcttggtgaaaagctgggggtcaaggctcacaggaaggggtgactatactcctatctgtatggtgactgtggcatgctggaaatgtgagtaaagccctcaaactctttgctcctttcccagtcctggggcagcaagggcagaaccactgcaggagccatagcggagaagctgttggtttcttctgagagctccatccctgggaaacccagagcaactaccagtaagaatgcttagcctggggtggggcagctgttctgtggtcccgagccaggggccctgcctggtgaagagttgggggtgaggactcacagggaagaaagactgagctccttttcatagggtggctgtggcatgctggaggtgccggcatatcaaccaggccctttgttccttccccagcctgaaggcagtaagggcagtactactgcagctgcaatgacagaggggctgtggatgtctctgtgattttttcttcanagaacgcagagctgccactgactgaagtattcaggtgcgggcagtgtaagtatgctgcaggcacannnnnnn

SEQ ID NO: 13747 - DNA, 408 bp, Homo sapiens
  misc_feature 1, 2, 3, 4, 5, 6: n = A,T,C or G
nnnnnnagcgagggcgcgttcgaggtacgcgggtctcatatgtccctaaattatttttcaaaaactcagacatacaccaaacagatatactggcacataagcctcaaataaggaggaacagaggactaaaactctgactgctgttctttgttctaaatttcttcctgaggggcctaaaagagccagaatgaacatttttttctactgatcccaaatttttagacaaaacttctccttaaccaattacaaatcaaaaatctttaaatccacctataacctgtgggcccctgatttgagatgtcctgcctttttaaatcaaaccagtatataacctccatatattgatttataactgctgtaacttctgccttcctgcccttagaaacccttaacctgtaagccatctgg

SEQ ID NO: 13748 - DNA, 638 bp, Homo sapiens
gatcaccagtgtgtccacagcatgccagcagctagaagtgttctcgagagtgctccggacctctctagctacaattttagatggaggagaagaaaaccttgaaaaaaatctccctgagtttgccaagatggtgtgccacggggagcacacgtgctgaggagccactgtgaagaaaggcatgcagccatgaaactgcagtgtcccttgctgttagtggggtggctctgaccaatctggaagatatagaaaatgccaagtatgacggtcgaaccaaacccattccaaagaaaggtacgaccagacactatttcagctaaaaccccagctcgaagaccaaagaagtgggttggcttgtctctgacagtcacgcttttgattcttttacttcctttgtggacacaagatggtggagatggctcagaagttgggagctgctctccaggttggggaggcactggtctggaccaaaccagttaaagatcccaaatcaaagcaccagaccacttcaaccagcaaacctgccagtttccagcagcctctgggctctaatcaagctctaggacaggcaatgtcttcagcagctgcatacaggacgctcccctcaggtaggaccatacagagctccatgaagacttggc

SEQ ID NO: 13749 - DNA, 364 bp, Homo sapiens
  misc_feature 1, 2, 3, 334, 363, 364: n = A,T,C or G
nnncgccctgacagagaacagcatgtaccttgtgggaatcacatggctcccacagaaagcacccgggatttgacactaacagcccagctacagagagcatgctcctggcttaccatgacaactgccagaactctggatgctttcatgggcacacacaaatttgattcatgtgtgagactccatagaatagacaagcaacctcagtatgagaggagaaaataattctctataaaatgaatcttacttggacactatacaatgtgggtttaatttcaaatacccaaaaggcttcatatgtgggctcacctacaagaaggtgccattgcttggattntgaagcgcagctccagtttatttaggaann

SEQ ID NO: 13750 - DNA, 719 bp, Homo sapiens
acctctcatttgtcacttttcaacacttcctggcaggcaggcagcataactggtcctgctgggtgatccagaccacactctgcaactctttcttctgagccaggctcccctactgtcttttcatttatgtcaaggcaggggaagacctcaaagggctcttgcatcccagtctcacttcccagagaggcacgaggccctccaggatgtggggacaggaactttggggcaagccggggctgtccagaagatcaccaggagggctaaatagtagaaaggagagtcttattggtgatatgtttgcaaactgggaaaagatagcctccagtgtggagcaaagatgctccttcttcaaagagggcaagggcagcttggattttgtgccttacagggtcggtattatataatagagtcatgcatattcagtaggtttgggggaaaagctatatatatttatgaggggagccaactacatgggcaatggataaacatacatgtaacacatcccatgttcacttaggggcaggattttagcattaaaatgaggtggaatttggctctttacatcaaaaggtgagctatcagacacaaaggcagtttgtgcacaagctctccaaagggacttgagggctacagctgctcatctggaaagaatccttgtaagaccagtcctctgtccaaccagagttaggaggcatctgacaatttgcctgattagctgt

SEQ ID NO: 13751 - DNA, 760 bp, Homo sapiens
acattttaatgaaagagttttaaaataggtaagtcttctaaaaacaataattactaagtccattttacaaatgttggtgggataaatgggtgggtcagattttcttaaaatcagaaacagactgctaaataacctactgaatacatctaggaaaactttttttttttttttttttgggacggagtctcgctctttcgcccaggcaaaaacattttaaactttatggaagatatacttatcttcagaagtataaaaaacacattgataaaaattgttaggctgacataaaaatattcattaaaaagcttgtatgcaaaatttaatcatataataacttgaaacttttaaaatgggatcacttgttatctccacatgttctcttctcaccaatttctcacaaaatctaaaacacagatgttagaactgtaaacattattaacctagagactaatttcctaaaataattacattttgcagaatatagagtgaatagttgtttctttctcacaaaaactggattgtgtaatcctaatatgaaatcacccaaatctcatgaaaagtaactttgcaaacctagccttaaatttcctaattagataagggcattaacaagccaagaagagattcttggcaacacagatgttttgtcctctatgtgaaaaactgtcctaaatctttctttcaatgaagttattttgcaaagataggatacagaagcctccatatgattgctgcttctttttggtagcaattcacctgt

SEQ ID NO: 13752 - DNA, 487 bp, Homo sapiens
  misc_feature 472, 487: n = A,T,C or G
actttttttttttttttttgaggcagggtctcactccatcgcccaggctggggtgcagtggtgtgaccacagtagaggtgcccacgaacttctgagctcaggcagtcctcctgcctcagcctcccaaagtgctggaactataggcgtgagccacagcgcccagccatgttatcctgtttaatcatccctgctccaaggtcataaatattcttccatatttgtttctagaaataatttttttcatatttatctgaatccatttggtatttatttttgtatgtggtgtatgacttgatccttacaaggcaaagacattcatgtgaagacagaggcagaaactgaagtgatgcagctctaaggcatggaacggtgaagggacttgccaggcaaccagagggctagggaagagatggggggagcaattctttcctaggagccttcgggagggtcgagtaattttgggacttttagnctccagaactttgan

SEQ ID NO: 13753 - DNA, 382 bp, Homo sapiens
  misc_feature 362, 363, 364, 365, 366, 367, 368, 369, 370, 371, 372, 373,374, 375, 376, 377, 378, 379, 380, 381, 382: n = A,T,C or G
acgcgggaagactacccacaaaaacatgacctcaccaaacaaactaaataaggcaccagggactaatcctggagaaacagatatacgtcctttcaaacagacaattcaaaatagcttttttgaggaaactcaaagaaattcaagataacacagagaaggaattcagaattctatcagataaatttagcaaagagattgaattaattaaaaagaatcaagcagaaattctagagttgaaaaatgcaattgcatcctgaataaggcatcaagaggctcttaatagcagatttgatcaagggcaagaaagaattagtaagcttaaagacagggcatttgaaaatacacagaggagaaaaaataannnnnnnnnnnnnnnnnnnnn

SEQ ID NO: 13754 - DNA, 1070 bp, Homo sapiens
  misc_feature 514: n = A,T,C or G
gcgtccgaaaagaatataggtgttaagtttatggagattttcaacttcagataatttttagtggagatgttttactttcttgaactcaaagattattataagagatctgaaataagtttaaaaggagtttagtatttttaaaagtcacctcaaaatcttgagaaatattgtgtgtatttcttcgtatacttacaagttaataggagtagtgtagatggtataagaaaggaatgaaactcagaaggaaatacaccacattggccataagaaataaacctcacaaattttatttgtttctcttccagatccgacgtatcctgaagggaaagtccattcagcagagagctccaccgtattagctccattagcttggagcctggctagcaacactcactgtcagttaggcagtcctgatgtatctgtacatagaccatttgccttatattggcaaatgtaagttgtttctatgaaacaaacatatttagttcactattatatagtggggtactcttgngtcagcagggccacatggtaaaggtatcgtggcggcccgcctgtcccaggcgactctagactcgagcaagcttatggatgcggccgaaattgagctcacttgggcaaatcgccctatagggaggccgattacaattcactgggcgtcggtttacaacgccatgacttggaaaaaccctggcgtacccaaacttatcgcccttgtgcaaatcccctttcggccagtggcggaaatagcgaaaaggccggaaccgatcgcctttcccaacagttgccaaccctgatggcggattgaaaatgtaagcgtaaaatatttgtaaaaatccgcgtaaaattttggtaaatcaagtaaatttttacccaaaggccgaaaatcggaaaatccttaataattaaaagaatgaaccgggattgggttgggtggtgttcaattgggacaagaagccacttttaaaggacggggcttccaacgtaaaaggggaaaaaaccggttatagggcgaggccccctacggaaccaaacccctataaagttttgggggaagagggccaaaacac

SEQ ID NO: 13755 - DNA, 288 bp, Homo sapiens
  misc_feature 1, 2, 3, 283, 284, 285, 286, 287, 288: n = A,T,C or G
nnnaaataatttttttttttttttttttttaggagagatggggtttcaccatgttagccaggatggtctcaatctcctgacctcgtgatccacctgccttggcctcccaaagtgctgaaattacaggcgtgagccaccgcgcccggcctttaattggttcttaaggaaactccctttgagtgagacgggaatttcttgtagggttttaagcaaaggagtgccttgatttaactgacgttttaataggatccctctgactgcagtatggaaaacaaactgcaannnnnn

SEQ ID NO: 13756 - DNA, 2821 bp, Homo sapiens
gcgtccgcccacgcgtccgttcctgatatgctctctgctcaaagaaatcatgctattaggattaaaaaacttcccaagggcacggtttcatttcattcccattcagatcaccgttttctgggcacggtagaaaaagaagccactttttccaatcctaaaaccactagcccaaataaaggcaaagagaaggaggctgaggatggcattattgcttatgatgactgtggggtgaaactgactattgcttttcaagccaaggatgtggaaggatctacttctcctcaaataggagataaggttgaatttagtattagtgacaaacagaggcctggacagcaggttgcaacttgtgtgcgacttttaggtcgtaattctaactccaagaggctcttgggttatgtggcaactctgaaggataattttggatttattgaaacagccaatcatgataaggaaatctttttccattacagtgagttctctggtgatgttgatagcctggaactgggggacatggtcgagtatagcttgtccaaaggcaaaggcaacaaagtcagtgcagaaaaagtgaacaaaacacactcagtgaatggcattactgaggaagctgatcccaccatttactctggcaaagtaattcgccccctgaggagtgttgatccaacacagactgagtaccaaggaatgattgagattgtggaggagggcgatatgaaaggtgaggtctatccatttggcatcgttgggatggccaacaaaggggattgcctgcagaaaggggagagcgtcaagttccaattgtgtgtcctgggccaaaatgcacaaactatggcttacaacatcacacccctgcgcagggccacagtggaatgtgtgaaagatcagtttggcttcattaactatgaagtaggagatagcaagaagctctttttccatgtgaaagaagttcaggatggcattgagctacaggcaggagatgaggtggagttctcagtgattcttaatcagcgcactggcaagtgcagcgcctgtaatgtttggcgagtctgtgagggccccaaggctgttgcagctcctcgacctgatcggttggtcaatcgcttgaagaatatcactctggatgatggccagtggctcctcgcctaatggttcttcgtcagccaaggggaccagataactcaatggggtttggtgcagaaagaaagatccgtcaagctggtgtcattgactaaccacatccacaaagcacaccattaatccactatgatcaagttggggggaatctggtgaagggttctgaatatctccctcttcatccctcccgaaatctggaatacttattctattgagctattacaccagttttaacaccttcctcgtgttatgtttaaaaaaataaataaatttaagaaaaccattttaaataatgcacagttgcagcctggaaaaacttaaggtggcgccttatagtatcaattttaggagctttatttggtgcatttaacgcaactggtaattgcagaatccactttgcctgtgtaagtgaaaaatatagactgttatcttgttggccctatgaaattctgcacttttcattatatactctaccttcattaattacttctgggcaaggatgttctggccttagcactcagttggcattcttttcctttttcttcctgttcattatgctttaattctgaggacccatatgagggtagaatattattatcttttaaaaattacaaaaattgtataggcaaaccatttccttaaagttgatgggcaaatttaaatgtatttctcatatcatttataatcttgtccatcctagagtggctttcggaattctccaaaggttcgggggggcacccaccagcgtgggcactcaggggccggggttacttcccggcctggcgtggtttcgctctttcatataccgcgtccgcagtcggtctgccggctgtctgctggcgtgttcacacacaacaaacgaaccacacgacacaccaagagacgacacaaacaaacaacacaccacgacaccacaaccagaaacgaccaaaacaccacgagacacagacaccacaccaccagcaccagcgcacacacaaccacacgacacaaccacacaacaacagacaacaccaccacacaacagaagaggaaagagggggagaaagagcggaaagagagcgacaggaacgagagcagaagacgagagagcgcaggcggcagaaagagaaccaaggcgaacagcaggcaagcaaaaaggcagaaaggaaggaagagacacagaaagaggaagcagggaaaggcagacagaccaaagaaacgaagcagaaggaagacgaacagaggacgaagaagagaggggagaaaggagcgagaggaggacacgacggcagacgacaaaacaggaaggaaggacgcagaaggagagaggagcgcgagggcaggagagagaggcagcagagggacaagacggaggcgaggggagaggaaagaagagacagggacggcgcacaaaggagaagcacgaacaagcacgcggagcaggaggacaggagaaacgagaggacgacaggacaagcaagaacacggagcaggacagacggccagaacgcgaaccacagacgaaacagaaagagcacagacacgagaagaagcacgacagaaagacacgaagccaacaacccacacaccaggcacggacgaaaacccaagcacagcaacacaagagagcaaaaggcaagcaagacgcacgagagagacgaacgaggcaacaagagaagcagaggaaagaagacgagaagagcac

SEQ ID NO: 13757 - DNA, 470 bp, Homo sapiens
  misc_feature 1, 2, 3, 4, 5, 6, 7, 8, 9, 470: n = A,T,C or G
nnnnnnnnncccccaggttgggacccaggtcggatcccctaataacggcccccagtgtggtggaaattgcccctagggtggttccggcccagggacccttttttttttccttccttcctttttttttttcgtatttttagtagagactaggttttaccgcgttagccaggatggtctggatttcctgacctcgtgatccgtccgcctcggcatcccaaagtgttgggattacaggcgtgagccacggagcccggccataggcctgtttcttattctatattcctgttaatgtaaacctcctgagattggaagacaatcagttttacagggtaagaattgttttaattatgtggcagcttttctccaaacatgaagagaaacattagaaatacgtttaataaaagtctctatgattttggtttctttcaggtaatataattttctcgacttattgatgttagtacaaaacn

SEQ ID NO: 13758 - DNA, 4020 bp, Homo sapiens
  misc_feature 1, 2, 1631, 4018, 4019, 4020: n = A,T,C or G
nnctggcgctgacgctggcgctggagagcggcgacgccaggagctgtgagagagcagctcaagcgggcgcacggctgcttcccggagggtcgctccccacccggcgccgcggccccggccgccgccaagccgccgccgctctccgccaaggacatccttttgcagcagcagcagcagcttggccacggcggccccgaggcggcccgcgcgcgccgcaggccttggagcgctacccgttggcggccgcggccgagaggcccccgcgcctcggctctgacttcggcagcagccgccggcagcgagcctggcccagccgccgacgccgcagccgccgcccgtgaacggcatcctggtgcccaacggcttctccaagctagaggagccgcccgagctgaatcgccagagcccgaacccgcggcgcggccacgcggtgccgcccaccctggtgccgctcatgaacggctcggccacgccgctgcccaccgcgctcggcctcggcggccgcgctgccgcctccttagccgcggtgtccggaaccgcggccgccagcctgggctccgcgcagcccaccgatctgggcgcccacaagcggccggcatccgtgtcgagcagcgctgccgtggagcacgagcagcgtgaggcggcagccaaggagaaacaaccgccgccgcctgcgcaccggggcccggccgacagcctgtccaccgcggccggggccgccgagctgagcgcggaaggtgcgggcaagagccgcgggtctggagagcaggactgggtcaacaggcccaagaccgtgcgcgacacgctgctggcgctgcaccagcacggccactcggggcccttcgagagcaagtttaagaaggagccggccctgactgcaggcaggttgttgggtttcgaggccaacggggccaacgggtctaaagcagttgcaagaacagcaaggaaaaggaagccctctccagaaccagaaggtgaagtcgggccccctaagatcaacggagaggcccagccgtggctgtccacatccacagaggggctcaagatccccatgactcctacatcctcttttgtgtctccgccaccacccactgcctcacctcattccaaccggaccacaccgcctgaagcggcccagaatggccagtcccccatggcagccctgatcttagtagcagacaatgcagggggcagtcatgcctcaaaagatgccaaccaggttcactccactaccaggaggaatagcaacagtccgccctctccgtcctctatgaaccaaagaaggctgggccccagagaggtggggggccagggagcaggcaacacaggaggactggagccagtgcaccctgccagcctcccggactcctctctggcaaccagtgccccgctgtgctgcaccctctgccacgagcggctggaggacacccattttgtgcagtgcccgtccgtcccttcgcacaagttctgcttcccttgctccagacaaagcatcaaacagcagggagctagtggagaggtctattgtcccagtggggaaaaatgccctcttgtgggctccaatgtcccctgggcctttatgcaaggggaaattgcaaccatccttgctggagatgtgaaagtgaaaaaanagagagactcgtgacttttccggtttcagaaaaacccaatgattacccttaattaaaactgcttgaattgtatatatatctccatatatatatatatccaagacaagggaaatgtagacttcataaacatggctgtataattttgattttttttgaatacattgtgtttctatattttttttgacgacaaaaggtatgtacttataaagacatttttttcttttgttaacgttattagcatatctttgtgctttattatcctggtgacagttaccgttctatgtaggctgtgacttgcgctgcttttttagagcacttggcaaatcagaaatgcttctagctgtatttgtatgcacttattttaaaaagaaaaaaaaagccaaatacattttctgacattgtaagattgccttactgtctgtcattccttattgctggcccctttctcaggccggaggccaagtggtggagaaggaaaggaaatgatcgaacgggcatgttgtcaagtgggcatgccactgggaaataccaccagtttaccctgaaacattgtcctcagaggagtaggaaagtggattttgaatctctattttgctcaaaagttcagttcctgagatactgatgactgagagtgctgctgggaaattttcaggattgtgtggtcttttggggttttttgtttttttttttttaagacaaagttgaccgctgttcactgtccacgtgatcagttgtaagattacaatgctgcatgctagttggttacataagatacaattccagtgatggaaggcggttataatggatggtggtgtgtacaagatggcactgccatctttgagcagagcccagctctgcagcgccacttcatctttttaaacaccctagaggtctgtttgttgttgctgttgtcctttattttgaaagagttgcaagagaagttacagtccaggtgaacttggagattgtgggattggttttgtttctgttttgttttgtttatcatttacctgtagtgctattgctgttgatactatcacctataccctgtttctagtgagtgctgaatacagtatggtacaatgacagtaacagccgcgtggtgctgccaggactgcccttgggcatatcagtgacagcccaaatgtgggtggaggaaacctgtaatttccttcttaacatgtgtttgaaataccaagtgaataatactgttctggaaaaaaatgataaactagtggaaattaaagaaattaagggttttatataatagacaggccccacctctcaaaatatttttagaagtctttttgtaaactaatttcttttgatcactattttgcatcagtaaaatgatttttttaaaaccaataaatcatcaattattagaaatagttgtctcacagtgatactggtttttcttttgtgctgttatgatttaacattgacaggaacactattttaaatccttacgttcaggtgtttgtaacttggccttataattaggctgaattatggcttcaaggtctacaatttatgtgtatggttcacagcctagcttctatttacatttgaaaatacagatttttaccaactttggattcttttttagttatatgtttgtctttcctttttaaattgttcaaaactattttttaatggtcaagttactaacacttgaaaatcagatactgcaccaaatacagtgtttttccgtagtgtttttaatgagtgcacctattactactgtgcgagaattcatgttttaccagtcattgttatattacaaacagacttgcatgattaaccagttgttacacttactttttcaagttggagtatatatgactcagtgcagactggtctctcttatgtgaatgcacacatgcagaaatgcagagtcaattttacatgcccataaagacatttgtaaagaattcagctcttatggtctgttgtataaatgtgtatctaggcactttattataactggaatttgacctcacagatgttacaacttgatcagtcgtttgacctaatttgtggtagctatctgtatgttttgaatcttaatacagacatgcttccaaaaagattaatacggaacaaatcggccggatggcgacacaggctattcaccgggtgaaaagggggaacccggtcggtcaccggaacagggggttaaaaggggggaaagaaatatagaccaggtataaagagccgggcagttagtgtgcaccaacatcaatacgaacaacactcgacaaactaatgcgccacgtagaccgattaatcgacggactcagaagcatagaacgtggcgcgaccatctacgaacaaacaagcagacaggattcgtctctcatgagcacaaaagcacaacagatgannn

SEQ ID NO: 13759 - DNA, 5662 bp, Homo sapiens
tttttttttttttttaaatgaaatctatgaattttttttattaaggatttgataagctgatataatgaaaacatgtaaatgaaaaacatttacactgactgtacgactagtgtgctaagccattacaatagtttactgacataactggcaagagtaacttggaaaataacttaatccagcagaacaaaaacatcctcagaaaaacatcctcagtagtactgaatatatctctctcatatatctatctatctatctatctatctatctatctatatatatatatatatatagctttgcacaatcagggagcaaggcacataatgaaatgagcatacatttatgcagaagaaaataatagcaacaaagctgcgagaaaaattgtaacttcatcttcactgagctgtgcataatcctttgaataataatgtcctctacctggtacattataatgaagttccttgtcttcttcatgctttaaaaaagtatacttctacattgtatctacctatggcaaagctcccacagcctacaagttggtgtgagccttgactcttgttttttaaagaactgagggagggagcaatcccagttaaatataatgtgcaattcccctttaacagtaaacaatgtttttaaaacacttagcacaagctaattttatcttaaatgtacatctctgtaagagttcactagtggctgatagtaaaatgaagcaaaattgtttgaaacattccagttaatgcttattttctagaaggggttattttacaagtagcaaaaaaaaaaaaaaaagtaggaggtggggaaataatatgaaaaacggcagtttttggtattaggttacaataaatttaacgaatggacagtttgcaaaatataagggtttctccccctttagtgctgcagacaagttttactgcctaagacgttgaggctgcaacaatcatgagcttggtattagtagccatccatgataaacataattaattctcaacttaaccatctataaaatatgtagtgttcaccatcaccctgactcaattcacttctctaaatgtctttggtagaaagcagccagaccccacgtgggtagtgatgtctcttgtgagacacttttcatttctgccaaaactagaaataccaccttcctttactttcattagcacctcaaagtttgcttgctggatttctttaaaaatattctgccaaaagagttgaaggcactgggggtttacagcaagtattttctctttaaaacggtttattacttcaacaagcaaagagcaaaccaactggagaaatgtatgttttttctttttatttatcaagttttattctacagctaaatttcagatttcttttacatatagaccttgcaagggcacggtaagaactgagcacttgttttatttgagggataaaggtgtagaaattttctctttgaattttataaggaaaggctgggtacagtggctcatgcctgtaatctcagcattttgggaggctgaggcaggaagatcacttgtggccaggagtttgagaccagcctgggcaacacagtgagacccccatctctaccaaaaaaaaaaaaaaaccttaaaagataataagtatctaattcttttatacttgcatttctctttggatcaaatctcaactttgtgagaggtcatacatttctacagggttaggagtaccctgcataatttatacaaatgtaaagtgtatattaaaaaaaaaaaagtgaaagttacctgcaatctaaagggttttcttcccctagaaacagtcaccctctcgtcaagtgtatgacccaattatacctattttatgaaaagcaaggcatcacattgataaccatacaggatcctatgggtttaactggtctaaacttgagtggattaaatcagttgtaattagttagctctgtaggtatatgaaaaacttttggtaatgtacaaaaataggaatgggttttttacctgtttaaagtcactttgtgtttataacaaaattacttttagctgaggaacaaaggtgacaaagatttctgttggtggctgagagtcaaagcaggccaatccacaccattacctgaaatatttttcaggctaatttataactttatggatttcctcgatacaagtttattagtttattctccatatacaagtttattctcccagaatagcagcaaataaaacttgaattggatgtacagctcctaataaccttgatgtcagagttgtcacttggttggaattattatgatcccccaatttaaattttcttgataaactcagcgttgtttgttttcagtgacaagaaaacatacatggaaaggggacccaagacagttcaccaagatagttcacagccctttgcaggatatgcctttggtgggtgggagcacctagattttagaggactataaaacgccatgtttactttgtttgaaattttctgatgaaaagtcttttgtaacttaacattccacattttcatttaaaaagtcccagaaatataaactatccaatttacaactaaggtgggtatctgtaaaaaccttaagaatagttactcttcccaagagaattacagcgtctaagggggggaaagaaagcatctgagcagtaaaagtcaagctggtaaaatccaatacagaatatctaataaaccataagttattttactgagaatagattctgctgccctacagcattggtgccaaaactctaagcatagagtgattctactttgaaattatccatagtagaaattaagagtgtcactaattaagcaagtcactacctctaataagcacctgtttgcactgccctcagcagcaggatgagttaatccatgctgttcacttttcagtacagccaagtcaactgcacagacttgaagcagccaagctgggtgagagctgcagagcagagggcagtgaaagaaggcacagtactagtgtcgtgcggcagtagatgctttccatgaatacaccagagaaaaagagctacagaaatacagtctaggaaaagctacatcccaacaaaaatccaaattaaagaaaacccactagggagtaaaacagaagtataaagtatcactttagtggttttttaaattcagttcatacatgaggttaaaacatttttaatagccatttctgtctgtggaggaatgtaaagggaaatggcctgttgtcggacaagccactggactggggttaaaatgacagtctcctcctctagccttactctcttcctggcatcattagtgttcaaaaggatgtctgctattccaggaaaacagaccagaagcatctgttcaggatggctatcatcaggattgatacaagcaagaaattccaagaaatcctgcactgaaaacataaaggctgttgttttagggctcaaatcatgggtgaaaaaaggttagcgggtacattttttccccctcaagaaaaactgaagtgttgtctaccttctcatgagaaaatcaccaccacaataaaactcaaaacctcagggatgaatactttgataactggattcatattcttactaactctaacccacaaatatgggtgcccctcaaactataaaactgcaggcagaagactatgagaaattcattcatgaatcacagtagcgcttggcaatctactcaaacattacccaaatttctgtgcatgcttaaattaacaatgcagatgtgttaaagatcacttcataaatatcaaacacaaaacttggtgaacaatttgaaagacctaaaaattaatggtatatattcttattgctccataaccacatgaacataaccgaacaatattctggagatgtagcaatggagaggtgctgttcactctctgtttacgatgcggttttcgtggagtgtgggttatgcaagaccttgagtatactgtactaattaagcacttttgctcattctagaattatttaccatctcttcccccactttactggcatcactttttccttgtgggacaatgtcaactgatttctgcagtttgcattggtaatcattaacaataggcacagactttcattacaagatgtgctccccttataagtgctgggatggcccatttttattctcttgtttaggagctgctctgagattgttttattcctaatagtccaatttatcataagttgatgagagtacttatttctctcatgtaccaaggaaaattcacagaaaaaagcatatagaagtatagtgtgtcgttagagcactgactccacgttataccaaactgcacacgcataaaacgtaatgtcagttactggacttggactgtcccactccatcagaacacctagtaacctgaactaatcacaaccaggctgcagtcagcaagggtcctggtagccccagtagctataaatgaaactgtcttccctctccatgtagtcccatacttaatgagctttttgtattacatattataacccatatacaaccagattaatgacacctgtacaggggccagttctgttctctcatcacccttcccttctatagagcaatgctcaaaaaatgcattttagaaaatgattttgtttttcataatgcaccatattggggcacaggatgtgtatatttcatataccaattgtctacagatatgtaataacacctacctaaagcacatattttaagaaggtaactggtgacccaaagacatactgggacagaacattacagagataactgtgttatccatcctcttaaaatcaatcaaagtgaggatcatgaagccaagttgataaagcttcataaaacagtactaaaaaggaactatccagaattatagcactaattatccatgtattgtaggcaaagagcttatctgtcagcacatcctaaatgtgggtggatcactgcagcagtactgcagctagaacagctgagttaattacgccatgtatttactttctatgcacaaccacatacagatgatgtctgtgaacatttccccatcctgcactagttacccgttctatgaagctgagagattttcctgatttaaagtgccccttcatgtatagcaatgaagtgtcagtcaagcaattctaacttcagccaactggggaaaaacaaacacaaaagccttatagatacaccaaacattctggtgatttttctcaaccagaaatagcacattctacatctattccttagttatataatacacaacatgcacgaataggctacacatggacagacacttataaataccttctaaataagtgattagaagtttttggtccaatccacatgatatagaaatcttaagagacaacacacatccccttctatgcctcttccacccaaaatacagaacacccattttcagattaggagagaaaaggaataaatagaataactctcagctctctctctatatacacatacacatacatatatgtatacatatatacacacactgtacagctgtgtgtacatgcacgtgtacacacacacatacacatatagctggacactacctgaataacatcataccaggaggctctgaacacctgaattcacagatgatcaggtgagctgattgtagcagtgattacagatatcatgaaaataaagcctcgtgccgaattcttggcctcga

SEQ ID NO: 13760 - DNA, 442 bp, Homo sapiens
  misc_feature 416, 441, 442: n = A,T,C or G
acttttttttttttttttttaaacagagcactttctaaaggtaaaatataggttggggaaatctttttcttgttagtattattcagccaaaacagtaaatctttttaaaaagcttcatatttaatgttcactcctacacatttaaaatatacatggttgcacagcctattcatggttaaaaaaattaatatatatttgtattaataatagaaaagttataagatggaaaagtataaaggaaaaaataaacttaggggataggtgtaagcattaggttttccatgattaacttatgcattttcattaattttaggtaaaacatgtctctattttaacatgatgtcatctctaatggaatacattagagctgggttaaaaagtaatttaccagtggaaagctcagtgctgttcagatntagaagtcagcccccctgagataann

SEQ ID NO: 13761 - DNA, 1418 bp, Homo sapiens
attggattgctggccagggtggctctgatatagcagccctggtgtattttcgatatttcaggaagactggcagattggaccagaccctgaattcttctagctcctccaatcccattttatcccatggaaccactaaaaacaaggtctgctctgctcctgaagccctatatgctggagatggacaactcaatgaaaatttaaagggaaaaccctcaggcctgaggtgtgtgccactcagagacttcacctaactagagacaggcaaactgcaaaccatggtgagaaattgacgacttcacactatggacagcttttcccaagatgtcaaaacaagactcctcatcatgataaggctcttacccccttttaatttgtccttgcttatgcctgcctctttcgcttggcaggatgatgctgtcattagtatttcacaagaagtagcttcagagggtaacttaacagagtatcagatctatcttgtcaatcccaacgttttacataaaataagagatcctttagtgcacccagtgactgacattagcagcatctttaacacagccgtgtgttcaaatgtacagtggtccttttcagagttggacttctagactcacctgttctcactccctgttttaattcaacccagccatgcaatgccaaataatagaattgctccctaccagctgaacagggaggagtctgtgcagtttctgacacttgttgttgaacatggctaaatacaatgggtatcgctgagactaagttgtagaaattaacaaatgtgctgcttggttaaaatggctacactcatctgactcattctttattctattttagttggtttgtatcttgcctaaggtgcgtagtccaactcttggtattaccctcctaatagtcatactagtagtcatactccctggtgtagtgtattctctaaaagctttaaatgtctgcatgcagccagccatcaaatagtgaatggtctctctttggctggaattacaaaactcagagaaatgtgtcatcaggagaacgtcataacccatgaaggataaaagccccaaatggtggtaactgataatagcactaatgctttaagatttggtcacactctcacctaggtgagcgcattgagccagtggtgctaaatgctacatactccaactgaaatgttaaggaagaagatagatccaattaaaaaaaattaaaaccaatttaaaaaaaaaaaagaacacaggagattccagtctacttgggttagcataatacagaagtcccctttactttaacttttacaaaaaagtaacctgaactaatctgatgttaaccaatgtatttatttctgtggttctgtttccttgttccaatttgacaaaacccactgttcttgtattgtattgcccagggggagctatcactgt

SEQ ID NO: 13762 - DNA, 583 bp, Homo sapiens
cctagaaaccaatgatcctattttaggatttcaggcaacaaatgagagattatttgttcttactaccaaaaacctctttttaataaaagtaaatccagagaattaattattctaacatattggcctctttgtactggaaaagtattcagtggtacctggaggtctggacagttatactgtaacctcttaagttttaatgtgctaaatatatcttgtatgattttttattttttaataacattggaaatatattcaagagattatgattctgtaaagctgtggaatgaagctgcagatttagagaacattggcttctgaaaaaaaaagagtgaagatagtacgcgggggactctcagcagctcaactgcccagcgtgaccagtggccacctctgcagtgtcttccacaacctgggatgaaattgattctgcagtaaagatgttggtgtcattaaaaatgagctacaaagctgccgcgggggaggattacaaggctgactgtcctccagggaacccagcacctaccagtaatcatggcccagatgccacagaagctgaagaggattttgtggacccatggacagt

SEQ ID NO: 13763 - DNA, 983 bp, Homo sapiens
  misc_feature 1, 982, 983: n = A,T,C or G
nctctgcctcccatcctaccattcactgtcttgccggcagccagcctgagagcaatgggaaatggggagtcccagcatgtcctcggtgcctgctcagaagctgggttggtttatccaggaatacctgaagccctacgaagaatgtcagacactgatcgacgagatggtgaacaccatctgtgacgtcctgcaggaacccgaacagttccccctggtgcagggagtggccataggtggctcctatggaccggaaaacagtcttaagaggcaactccgatggtacccttgtcctcttcttcagtgacttaaaacaattccaggatcagaagagaagccaacgtgacatcctcgataaaactggggataagctgaagttctgtctgttcacgaagtggttgaaaaacaatttcgagatccagaagtcccttgatgggttcaccatccaggtgttcacaaaaaatcagagaatctctttcgaggtgctggccgccttcaacgctctgagtaagcattgctgggtgtcaggagagaaaagccaaagaagcgggtgccagacagctctgtgcaacctctaggccatgagtgggatagataccactgctgctttaaaaaatgggagaccatagaccctcaggagagaagaatcccttctaccctggactcgctctcttctctggaactaacttctcccccataccctgattgtctttggagaaaatgttctggattctagaatctaaggcagagccttttaagccatactgtcaacttaatcacctggaactggttaacatggagatctggaccacgacgggcctaagattaagcccagacctccaattctagacccgtccttgaaagcctcgtcgctccgcacataagatatgcagatttagacaaaaccgttggatacacactaagactacacaactcgccacagacacatcatgagaactttaacatgatatcagcaatacagcann

SEQ ID NO: 13764 - DNA, 233 bp, Homo sapiens
  misc_feature 231, 232, 233: n = A,T,C or G
acgcgggggagatctgtgtcagaacgtgcgtgtgagcggatacaaaacccgagagaggcgtgagcagcgctgagtttgcgagcgggagcgaggggcgccggctggggtgggtgctcctgagctcttcagaaaccaggctgttttcaggaacattgctgtggattactagctctgacacaacacatgactaagacagaatgagaccactctagttgccatatgggaaactcnnn

SEQ ID NO: 13765 - DNA, 2434 bp, Homo sapiens
cgagagtacttctagaattaattaacgcgggggctggttgccgtccttgcaactgtgtcttatttgcctgtgccgttatatcttggtgacccctccacgtgtacactactgacaaacgggtggagtgctggggagaagtcactgtgccgcccacctagtaaaccttctgtctgtgctcatggcatctccaagatggggcactgctgtgtgcagaatccagggtcctctttctgcttgcaactcctttccctggatgccccagaaacaatccaggcctcctttcctatcttacccctttgctttgctttttaccccagcacctctataaccgccttctcttcttttcagaactccttgtttctcgtcctgttttttatgattacaaaactcttgcttccaccctggaagataactgctatagatgcctgtatgtaaatggtgctgtctccagcaactggcatgctgaagaagaattgattcacggggtataaatgttggggattggaagtggggatgaaatggcacttgttgatacaggagcagagaggtgaggccgactgctgaagacagctcgccaccctccttgcctccactccaatccaggggctggggccacattctttgccttcatttatcctcagatcaggtgagatcgacaggaggtgttgatggcagtgccagcaattattgctaatccgtttgcatccttatgcatagatctgaattcagactttgtgaatttccagaggtgtgggtaatataatagaattcagtgagtgggcatggctgatcttgtgcaaattaaaagttatggggcataagaatagcaaaagttgaacttcttttaaaaaggaaagtaccctgagagccagtattggttgaggctcttcagtatgcccaggttggcagcactgagaaccgcaggaacggcctgttgttacaaaaaggagattgactcagctgcccttggtgcatctgactgactatgactgctgagagattccaaggacccttaatgccagggctaacctctccatgtgcagtgagacctctggaggaagtgtcatcctctggctttgtgtggtactcattatggtgcagtgcgggcatgaaatgaagacacccaaataggcttacagatacgatatgttttaaatgttcgtatttaacaaaaacatactgacactgtttggaaatggcaacaggaagatagcaaaatgaatactaacattacgaaaagatgaacaggtacatgttccaaggcaggtggctgtgaacttcctctgagtgaaggcatcccctccagcacctttcagcctgctagttaggacgacccgccgccaccctccaggacctccagccctgcactgcctttcctctcttttaaataattcttcattgagttctaatatgtaaaaaaaaaaaagtttactgtaaagtttgcaaataaggaaattttttttaaaagtcctcagtaatcttaccagtaacaattgttatgggcacatttgcttttggaagatttcttttgtatgcatgggataagtacatttttaaacaaaaatgggattatgccataaattctattttgtgactttaatatatagtgaacaccttttttaatgatgacaggatgttcccttgcatggctgtatcaatttaaacaatcttgtttcaatgggcatacagggtattttctagtttttttttcctcttagaaaataatacttgcgatgactttccttgtagctcagactttttcacgtctgttgttatctctttgggaatgctgaatacatacatttcgagaaggaaatgactgttaaactcttaagacttcaggttcatattgctaaactgcccagcagggagggattttttcaattagtgttctcactggtgaggcaaacctgatgccttcccctcttcctcagaaccggctttatcacattgaaaacctttgctcctccgacggatcgagtctgctttccctgtggatgtgagcattgctttgtctgctggtgactgaacatctctaccatgtgtcaattggccatttgtggtgtgtgtgtgtgtgcgtgtgtgtgtgtgtgtgtgtgtgtatgattttctaattcctagtcatttttctattgattgttttgcaaaagccatttacatcttaaggatattgataatcttttgttatatttgatgcaaatatttttttccagtttataggttgccttttaattttgtgtttcaggtagataaaagttaaacgattttcttaggttagtttatcactgtggtttctgaacttgttatgtgtagatcttttccaccccaagagtacataaatattaatccatactttcttatggaacttgtatggtttcgttttttacatttaaaccttctttccccgcgttaattaattctagaagactcccga

SEQ ID NO: 13766 - DNA, 7133 bp, Homo sapiens
  misc_feature 6922, 6926: n = A,T,C or G
gacccacgcgtccggccgctttttcccttcgctgcgtggccttggccgagaccggtcctctgcggagagggccccgccctctgtgaaggcccgcccgggaattggcggcggcgctgcagccatttccggtttcggggaggtgggtggggtgcggagcgggacttggagcagccgccgccgctgccaccgcctacagagcctgccttgcgcctggtgctgccaggaagatgcggccggagcccggaggctgctgctgccgccgcacggtgcgggcgaatggctgcgtggcgaacggggaagtacggaacgggtacgtgaggagcagcgctgcagccgcagccgcagccgccgccggccagatccatcatgttacacaaaatggaggactatataaaagaccgtttaatgaagcttttgaagaaacaccaatgctggttgctgtgctcacgtatgtggggtatggcgtactcaccctctttggatatcttcgagatttcttgaggtattggagaattgaaaagtgtcaccatgcaacagaaagagaagaacaaaaggactttgtgtcattgtatcaagattttgaaaacttttatacaaggaatctgtacatgaggataagagacaactggaatcggccaatctgtagtgtgcctggagccagggtggacatcatggagagacagtctcatgattataactggtccttcaagtatacagggaatataataaagggtgttataaacatgggttcctacaactatcttggatttgcacggaatactggatcatgtcaagaagcagccgccaaagtccttgaggagtatggagctggagtgtgcagtactcggcaggaaattggaaacctggacaagcatgaagaactagaggagcttgtagcaaggttcttaggagtagaagctgctatggcgtatggcatgggatttgcaacgaattcaatgaacattcctgctcttgttggcaaaggttgcctgattctgagtgatgaactgaaccatgcatcactggttctgggagccagactgtcaggagcaaccattagaatcttcaaacacaacaatatgcaaagcctagagaagctattgaaagatgccattgtttatggtcagcctcggacacgaaggccctggaagaaaattctcatccttgtggaaggaatatatagcatggagggatctattgttcgtcttcctgaagtgattgccctcaagaagaaatacaaggcatacttgtatctggatgaggctcacagcattggcgccctgggccccacaggccggggtgtggtggagtactttggcctggatcccgaggatgtggatgttatgatgggaacgttcacaaagagttttggtgcttctggaggatatattggaggcaagaaggagctgatagactacctgcgaacacattctcatagtgcagtgtatgccacgtcattgtcacctcctgtagtggagcagatcatcacctccatgaagtgcatcatggggcaggatggcaccagccttggtaaagagtgtgtacaacagttagctgaaaacaccaggtatttcaggagacgcctgaaagagatgggcttcatcatctatggaaatgaagactctccagtagtgcctttgatgctctacatgcctgccaaaattggcgcctttggacgggagatgctgaagcggaacatcggtgtcgttgtggttggatttcctgccaccccaattattgagtccagagccaggttttgcctgtcagcagctcataccaaagaaatacttgatactgctttaaaggagatagatgaagttggggacctattgcagctgaagtattcccgtcatcggttggtacctctactggacaggccctttgacgagacgacgtatgaagaaacagaagactgagcctttttggtgctccctcagaggaactctccctcacccaggacagcctgtggcctttgtgagccagttccaggaaccacacttctgtggccatctcacgtgaaagacattgcctcagctactgaaggtggccacctccactctaaatgacattttgtaaatagtaaaaaactgcttctaatccttcctttgctaaatctcacctttaaaaacgaaggtgactcactttgctttttcagtccattaaaaaaacattttattttgcaaccattctacttgtgaaatcacgctgaccctagcctgtctctggctaaccacacaggccattcccctctcccagcaccttgcagacttgggcccatcaagagctactgctggccctggctccgcagcctggatacttacctggccctcctccctagggagcaagtgccttccacttacttcccatccaggtctcagaggtctcaaggccaaccttggaatccttatttaaccattcaagtaatcaacggaagttttcaccctttaatcttaagtttagccttttaagaaaaacagtaagcgatgactgctgaaaggctcattgtgtaatctcccaagggtttggtcttattccattttcttctggtcaccagatgatttcttcctttaccatcaaatacttcttcataatggtcacagtctgaggatgtgcgcaaattctggttcttcccaagctctaaccgtaacacgtcccaccccctttttaaagcacttactgttttcagagcacccatatcccaccctggtgagaaggccactctcacatctgagtgttgggtacaaagctgctccgtagagtgatgtgcactcctggtgggtgaggggcaggggcagtggcagtgtgcaaagaattgattactccttgcagagcctgtggcttgcatttcctactgctttctacgtttgaaaattatgacagtctctggctaggtctgggtccagattaggatttaaactgataaaggaaactgttggtaaatcctctgctcagaaagcatttatcatgttcctatttaaggattaggtttattaatttaggcctcttagaagctatcccacttaaatattactcttctgaatgctagttctcttttattcttgatgtcctaagtcaattgaatctggcatctggggctagggtctgcctgtctacatattttttatttttttctgagaaattctgaacacatagatctctttcctaaactgacattttctattttgactgttttcatactataaccaggtaaagggacttctttcagagagctttatactgcctgaccaaagaacaaatctgaaaatcaccattttaaagttattttttcagttgaaccaaagtttaagtgaagaggacttttggcatattatacccaggatcagtttgtctttttgtatccatcaagtattacaggagaaggattgggaacagaatggaaaaacagtgtatgaaagtcatgttacaggccgagtgcggtggctcacacctgtaatcctagcactttgggaggctgaggcaggtggctcacttgaggtcaggaattcaagaccagcctggccaacatggtgaaaccccgtctctactaaaaagacaaaaaattagctgggcgtggtggcgggcacctataatcccacctacttggtaggctgaggcaggagaatcgcttgaacccaggaggcggaggttgcagtgagacgagattgtgccactgcactctagcctgggtgacagagcaaaactgtgtctcaaaaaaaaaaaagtcatgttacacatttaagtttttgaaattgctccttttatcggtaaagattctcaatccaaattctcctgggtgtgttgtcatcagctgtgatatgtttgtgcacattacgtatagcagaggatgtaagcaatattattgtttgtgaagttttgtttttaatgtcttgagtatgagttatgtttagtcactgtcagcatctgagaactttaataagcccttgagatattccaaagttttattttacttttttaaagaacagaaaaagatgaatgaaagaaccaaggagagatgcagagactatatttagcatgtataggttaaagtaagaaggaggttgtggtaactaaataggagtcctataaaatcaaatacattgtcaaccttttctgcacatctagtttcctaccatagaatcccactggaataccacatagcttttgcactgcagttactatttactaatgtaaacgtagggtttgtaaaagtcacaaacttgtaagcaatgaacttacctgctagtctttttattttggcttgcatgaagtcactgcaaattcaaatgtcagtaccggcatttaaaatatatctatatcactttgttggtacaaagttatttcaagataagtgtaattttgttacaagtttattttgaagagacaaatctcctgtgatctatgcaggacctctgtactttctaaagaacaaaatgttatgtagacattatacatggttggttgtctcttcttgaaactgtaatgtaaatctagggtccagtcatatcctaggtatcatcatttatccaagtacttggaggaatacaagtatatataaatacagtcattgagaataagtcgatttgaggcatacaagagtagtttcttacacagtttaacacagcctgattcaagactctgataggattcaaacagataccggttaaccatgactaccaaaactgatcatctgagtcgattgatagaggtgtgactagtccttagcactttttctcattcctctttttattcagcattgctgttacctatttcaggtttataagacctctttcagcagatcacatcagaagccaggaaatgcatagctaggagatgtcaaaagcccatatgaggagtggaccaagcagcagtggcggtttctcctcgcatctttttttttttaagctttaacttagcaggggcatggactttatagcactttttcaactttttgctttgctttggataagaaatccttacctttaaaaaaagcttctagtctccataacccccaaagtactgcttatttgtttgaagaatccagccatcgtagtgctttagtcactatcgtaaacattcatgatagggcaaggattttaaaacaggattcttgcttctgtagtcatcaaggtgaacagaagcatcctacacaaccactaagggctctatgtttgtgtcatgcctcttcaaacaccaaggagttgaacatgcttccagtgatttgtctccgtaatgccttcttcctttatttggcctttctttctttctgtaccttcaagttcttgatttttaaaattccaactctagagaaaaccaatatatggtggtgctgggctttgaagatagcatatcagacgccttggttctgtttgtacacttagccttacatttcaggaggaggcttttcattaggggcttaagctagctcctttggcttttaaaaacaattttttttcaaatttcttcattacctaagggagcctgcatctaaatttctcaactagttcagcctagctgaattttctagtgtgtaatacactttgcttccttcttattgatgaaaaccagggggatgagtggcttccatggagagatttcctgatttctcagggaggaaaaaagtgatgacatttaccactacttttatgtttttcccctttttccaaattgataaggatttctggttcctagtgatccgggattgggcaacagtgcagaactgccagtcatgccgtaggccgtgaagaaagaatgtgagtaactgttgttttgcaaggatttgtagggttatgggcagttgttgtttgaagcattgctatgacctaattcccaaggtatctttcctctcttggtgttctaggtaagccaatgagctttaatctctacttgctataaccgtgtgcttagaaaaagaggtgagagtagtggttttccttcaaactgtccacattcatgaagattatgaattgttaggacagccagggcaagatagaccctgtctctacaaaaatttttttctaaattaaccgggcatggtggtgcctgcctgtagtcccacctgtgtgggagaatcacttgagcctgggaggtcaaggctgcagtgagccatgattgcacccctgcactccagcctgggtgacagagtgagaccctggctcaataagagggggaaaaaaaattgttaggagctgggtgcggatgcagcctgcaatcccagctacttgagaggctgaggccggaggattgcttaaacccaagaatttgagcgtagcctgggcaacacagcaagaccccatctaagaaaaaaatgttttttaaatcagcttagcccaaaggggttgtgaatggggaggtataaaaagcaaagattattttttggctactaagccaagaacttacagggattttttttttcagtcccagaacctacagataccctgctacttgcttcacgtggatgctcagtgcccagcagccatcttaatacattaaaccagtttaaaaaataccttccatgtggagaaaaacatgtctttttctcgcctcaactttatccacatgaaatgtgtgcccatggctgggcgcagtggctcacctgtaatcccaacactttgggaggctgaagcaggcagattgcttgaggccaggagttcgagaacagtctggccaacatggcgaaacctcatctctactaaaattacaaaaattagccgggcatggtggcacatgcctgtaatcccagctacgtcaggaggctgaggcacaggaattgcttgaacccaagaggcagaggatgcaatgagccaagatcacaccactgcactccagccttggcgacagagggagactctgtctcaaaaaaaaaaaaaaaaaagaaaaacaatttgtggtagaaatatctttggctaaactatgtttagcctanagtntataacagcttttagctcactctgactgcttttcaaaacaaaagaagatatacatgagggagttttcataaatgacagagtatcttactttgccaacaagagcaggaatgttcattgaattcgttgcaaatcccatgccatacgccatagcagcttctactcctaagaaccttgctacaagctcctctagttcttcatgcttgtcca

SEQ ID NO: 13767 - DNA, 1785 bp, Homo sapiens
  misc_feature 80, 81: n = A,T,C or G
ccgcgtccgaatttgtctggaaacttgtgttccaaaatagaatctgtggtttagattttaaaatagatttaatatacatnntcctgaaaaagagattaccttaaccacaataaaaagaagacaacacatattattttcattcttaactctaggggaaaaaatgtaaacattagttgcaaaaagctattttagtgtatggaaggatgttcttgggaaaaaaataaaaacataaaagggagagaggaaataaagaaaccacggttttgtgaggtagtactttcaaagggatctatgtatctcagaagctagtcaacaggttttaagtatgtggaattgtagggttttatataaaaatggaagatacagtctctactcttaaggagattaaaacacaaacatctcctcaattgacaaggtctctttccatgctttctatctgggctaagagacttatccttgaaaaatgtttgtgggtaaacattttttactctctgcttcccattgtcctatcctcttctccatgcctgccatccttaagaggactgaagcaggttatagaggaatcgcagctgtgcactcccactaccctcatctcttcagtcaccatgtcattaacagcatctctctctgctatattctccctcctttcaatagcccagccttctttgtgtttcaaagcaggcaagaagcctgtctagctagctgtttaaattggaattcttctagagtttgattcttcattttcttctttctccactaaaattgatttcacatgtgtttgactcaagggtgaacctggtgtggttggtgctgtgggcactgctggtccatctggtcctagtggactcccaggagagaggggtgctgctggcatacctggaggcaagggagaaaagggtgaacctggtctcagaggtgaaattggtaaccctggcagagatggtgctcgtggtgctcctggtgctgtaggtgcccctggtcctgctggagccacaggtgaccggggcgaagctggggctgctggtcctgctggtcctgctggtcctcggggaagccctggtgaacgtggtgaggtcggtcctgctggccccaatggatttgctggtcctgctggtgctgctggtcaacctggtgctaaaggagaaagaggagccaaagggcctaagggtgaaaacggtgttgttggtcccacaggccccgttggagctgctggcccagctggtccaaatggtccccccggtcctgctggaagtcgtggtgatggaggcccccctggtatgactggtttccctggtgctgctggtcctcggggaagccctggtgaacgtggtgaccggggcgaagctggggctgctggtcctgctggtcccccaggaccctctggtatttctggccctcctggtccccctggtcctgctgggaaagaagggcttcgtggtcctcgtggtgaccaaggtccagttggccgaactggagaagtaggtgcagttggtccccctggcttcgctggtgagaagggtccctctggagaggctggtactgctggacctcctggcactccaggtcctcagggtcttcttggtgctcctggagtcaacggtgctcctggtgaagctggtcgtgatggcaaccctgggaacgatggtcccccaggtcgcgatggtcaacccggacacaagggagagcgcggttaccctggcaatattggtcccgttggtgctgcaggtgcacctggtcctcatggccccgtgggtcctgctggcaaacatggaaaccgtggtgaaa

SEQ ID NO: 13768 - DNA, 3641 bp, Homo sapiens
gcgtccgcgcgctcgggctccgtcagtttcctcggcagcggtaggcgagagcacgcggaggagcgtgcgcgggggccccgggagacggcggcggtggcggcgcgggcagagcaaggacgcggcggatcccactcgcacagcagcgcactcggtgccccgcgcagggtcgcgatgctgcccggtttggcactgctcctgctggccgcctggacggctcgggcgctggaggtacccactgatggtaatgctggcctgctggctgaaccccagattgccatgttctgtggcagactgaacatgcacatgaatgtccagaatgggaagtgggattcagatccatcagggaccaaaacctgcattgataccaaggaaggcatcctgcagtattgccaagaagtctaccctgaactgcagatcaccaatgtggtagaagccaaccaaccagtgaccatccagaactggtgcaagcggggccgcaagcagtgcaagacccatccccactttgtgattccctaccgctgcttagttggtgagtttgtaagtgatgcccttctcgttcctgacaagtgcaaattcttacaccaggagaggatggatgtttgcgaaactcatcttcactggcacaccgtcgccaaagagacatgcagtgagaagagtaccaacttgcatgactacggcatgttgctgccctgcggaattgacaagttccgaggggtagagtttgtgtgttgcccactggctgaagaaagtgacaatgtggattctgctgatgcggaggaggatgactcggatgtctggtggggcggagcagacacagactatgcagatgggagtgaagacaaagtagtagaagtagcagaggaggaagaagtggctgaggtggaagaagaagaagccgatgatgacgaggacgatgaggatggtgatgaggtagaggaagaggctgaggaaccctacgaagaagccacagagagaaccaccagcattgccaccaccaccaccaccaccacagagtctgtggaagaggtggttcgagaggtgtgctctgaacaagccgagacggggccgtgccgagcaatgatctcccgctggtactttgatgtgactgaagggaagtgtgccccattcttttacggcggatgtggcggcaaccggaacaactttgacacagaagagtactgcatggccgtgtgtggcagcgccatgtcccaaagtttactcaagactacccaggaacctcttgcccgagatcctgttaaacttcctacaacagcagccagtacccctgatgccgttgacaagtatctcgagacacctggggatgagaatgaacatgcccatttccagaaagccaaagagaggcttgaggccaagcaccgagagagaatgtcccaggtcatgagagaatgggaagaggcagaacgtcaagcaaagaacttgcctaaagctgataagaaggcagttatccagcatttccaggagaaagtggaatctttggaacaggaagcagccaacgagagacagcagctggtggagacacacatggccagagtggaagccatgctcaatgaccgccgccgcctggccctggagaactacatcaccgctctgcaggctgttcctcctcggcctcgtcacgtgttcaatatgctaaagaagtatgtccgcgcagaacagaaggacagacagcacaccctaaagcatttcgagcatgtgcgcatggtggatcccaagaaagccgctcagatccggtcccaggttatgacacacctccgtgtgatttatgagcgcatgaatcagtctctctccctgctctacaacgtgcctgcagtggccgaggagattcaggatgaagttgatgagctgcttcagaaagagcaaaactattcagatgacgtcttggccaacatgattagtgaaccaaggatcagttacggaaacgatgctctcatgccatctttgaccgaaacgaaaaccaccgtggagctccttcccgtgaatggagagttcagcctggacgatctccagccgtggcattcttttggggctgactctgtgccagccaacacagaaaacgaagttgagcctgttgatgcccgccctgctgccgaccgaggactgaccactcgaccaggttctgggttgacaaatatcaagacggaggagatctctgaagtgaagatggatgcagaattccgacatgactcaggatatgaagttcatcatcaaaaattggtgttctttgcagaagatgtgggttcaaacaaaggtgcaatcattggactcatggtgggcggtgttgtcatagcgacagtgatcgtcatcaccttggtgatgctgaagaagaaacagtacacatccattcatcatggtgtggtggaggttgacgccgctgtcaccccagaggagcgccacctgtccaagatgcagcagaacggctacgaaaatccaacctacaagttctttgagcagatgcagaactagacccccgccacagcagcctctgaagttggacagcaaaaccattgcttcactacccatcggtgtccatttatagaataatgtgggaagaaacaaacccgttttatgatttactcattatcgccttttgacagctgtgctgtaacacaagtagatgcctgaacttgaattaatccacacatcagtaatgtattctatctctctttacattttggtctctatactacattattaatgggttttgtgtactgtaaagaatttagctgtatcaaactagtgcatgaatagattctctcctgattatttatcacatagccccttagccagttgtatattattcttgtggtttgtgacccaattaagtcctactttacatatgctttaagaatcgatgggggatgcttcatgtgaacgtgggagttcagctgcttctcttgcctaagtattcctttcctgatcactatgcattttaaagttaaacatttttaagtatttcagatgctttagagagattttttttccatgactgcattttactgtacagattgctgcttctgctatatttgtgatataggaattaagaggatacacacgtttgtttcttcgtgcctgttttatgtgcacacattaggcattgagacttcaagcttttctttttttgtccacgtatctttgggtctttgataaagaaaagaatccctgttcattgtaagcacttttacggggcgggtggggaggggtgctctgctggtcttcaattaccaagaattctccaaaacaattttctgcaggatgattgtacagaatcattgcttatgacatgatcgctttctacactgtattacataaataaattaaataaaataaccccgggcaagacttttctttgaaggatgactacagacattaaataatcgaagtaattttgggtggggagaagaggcagattcaattttctttaaccagtctgaagtttcatttatgatacaaaagaagatgaaaatggaagtggcaatataaggggatgaggaaggcatgcctggacaaacccttcttttaagatgtgtcttcaatttgtataaaatggtgttttcatgtaaataaatacattcttggaggagcaaaaaaaaaaaaaaaaaaaaaaaaaaaaaaaaaaaaaa

SEQ ID NO: 13769 - DNA, 439 bp, Homo sapiens
  misc_feature 1, 438, 439: n = A,T,C or G
nacaccatcatgccagctaattttgtatttttgtacagatgggttttggtcacgttggccaggctggtctcgaactcctgacctcaagccatctacccacgtcagcccctcaaagtgctgggattatggcatgagccaccatgcctggccagacaggagaacttaatgattgcaggcatttaaggaagtctctgcacaattatgagctgaccattaaactaaccaagcagagaccttggtggccacacacaattaaaaaatatagacttaaaataattcagaaatgacaacacaaaccagtgacaacaaataacaagaataaactctgggggtgcaggaaaattccgatttacagaattgctactgttagagaaccaaactggggcccgcttgcctgctgcagtaagaccagatatctacactgaggtttgtagcgann

SEQ ID NO: 13770 - DNA, 2843 bp, Homo sapiens
  misc_feature 1, 2, 3, 4, 2815, 2816, 2817, 2818, 2819, 2820, 2821, 2822,2823, 2824, 2825, 2826, 2827, 2828, 2829, 2830, 2831, 2832,2833, 2834, 2835, 2836, 2837, 2838, 2839, 2840, 2841, 2842,2843: n = A,T,C or G
nnnnaaccctgtcattatttcccctccgactgggccggtgccatcggaaaccggagtgaccagaggagggacacgcatccaatttcactgggctgcaagatatcaataagccttgcctctttaaactacttatgtacaaataaaagtgatggtgagaacctggctcaggaaatgcagtagcaggccatattgcatccaaaggaattactcacagctgtgctgtgtgcattctctgtgggcctagcagggaaggggacagccctgtggcaatgggcatgacacggatgctcctggaatgcagtctcagtgacaagttgtgtgtcatccaggagaagcagtatgaagtgattatcgtcccaactttgttggttactatcttcctcatccttcttggggtcatcctgtggctttttatcagagaacaaagaactcaacagcagcgttctggacctcaaggcattgcccctgttcctccacctagggacctaagctgggaagcaggacatggaggaaatgtggctttgccacttaaggagacatccgtggaaaactttctgggagctaccacacctgccctggctaagctgcaggtgccgcgggagcaactctctgaagttctggagcagatttgcagtggtagctgtgggcccatctttcgagccaatatgaacactggggacccttctaagcccaagagtgttattctcaaggctttaaaagaaccagctgggctccatgaggtacaagatttcttagggcgaatccaattccatcaatacctggggaaacacaaaaacctggtgcagctggaaggctgctgcactgaaaagctgccactctatatggtgttggaggatgtggcccagggggacctgctcggctttctctggacctgtcggcgggatgtgatgactatggatggtcttctctatgatctcacagaaaaacaagtatatcacatcggaaagcaggtccttttggcgctggaattcctgcaggagaagcatttgttccatggggatgtggcagccaggaatattctgatgcaaagtgatctcactgctaagctctgtggattaggcctggcttatgaagtttacacccgaggggccatctcctctactcaaaccatacctctcaagtggcttgccccagaacggcttctcctgagacctgctagcatcagagcagatgtctggtcttttgggatcctgctctatgagatggtgactctaggagcaccaccgtatcctgaagtccctcctaccagcatcctagagcatctccaaagaaggaaaatcatgaagagacccagtagctgcacacataccatgtacagtatcatgaagtcctgctggcgctggcgtgaggctgaccgcccctcacctagagagctgcgcttgcgcctagaagctgccattaaaactgcagatgacgaggctgtgttacaagtaccagagttggtggtacctgaactgtatgcagctgtggccggcatcagagtggagagcctcttctacaactatagcatgctttgaagagtctcgggcaagaaacattcatgcatgagtatatgttcttggaatcaattcctctaagaacagagaatggtctttcccagggacacaaagggagaaatgggacatggattcttgatcttcctttacacatttctcgggaaatctgaaatgatgctggatgggactctacacatcctgagctaagacatactgtcagtctcacttctgctgtcccagtcctagaaatcctgggtagaagtggtggacctgtgcaaaggaggttttagaactctgcagtatttgttggggcatggcacaaataagctcatccctcccgtccgaggctagtttcctctggaaccacatttttatctagatgaaaatttggaatgaaatgaaggaatagaaatccaataaaagagttgaagggaaagaaaatttaaggttcttcttgctcaggattacagatatggaccaacacctccttcaagaaaaggtggtaggacacaaagttcttcagtcctgagccctacatgtggggttggaggagaactataacggaaaaacctctgagtttcaccttaggtatagataaaagaaagatggtccccttttatctgattctgagacaggtaaattctgtttgttactacgtttaattagaaggtggaggagtcatttcatgattaagaacattcaacatgtattgttcattaagctagcttcctagttccgattagactaaggagactaagcctagagagtcaatgttagaacagtgaaaagaattctgtgtgtgtgtgtgtgtgtgtgcacaataaataggaaatgtagaaaccaagcaagaaggcttagtagctcagtctttaacaagggctagaaaagaatgtaatctgatatggaaggatagcagcttctaattttcaatcatctgttgatatactgtgaaacttattttattaaattaatatttattaaatggaaatatgcttttctggtttataactactaaaaatatcatagggaggataaaagtaaataagtgaaagttaatgccaatagaaaaattcaagagataatgtacaatgtcagaaaagggattctttatgtgtaaatggggataatacctatttcacaaggttgttctgaggattgatacgttttgagtatgtatttgtacactatctggcacatatgcgctcaataaacgtgtttctcctttaaaaaaaaaaaaaaaaaaaaaaaaaaaaaaaaaaaaaaaaaaaaaaaaaaaaaaaaaaaaaaaaaaaaaaaannnnnnnnnnnnnnnnnnnnnnnnnnnnn

SEQ ID NO: 13771 - DNA, 2265 bp, Homo sapiens
gttcgccacgcgtccgtttttttttttttttttttttttttttttcgatttatcgttatttattatcaaaatcatgaccagtgtgtagacatacttgtgaaaatatacagcaacttggggcttataacacatgagcaaagatgacattaacacgtgcactgttcacatcttggggtctagaggtcaagaacaaagatcacagacaagacgttactaaacggacccctgcagtaggtcccgaattgcagaatcatccaattccagcatggtcagcacggagatattcacagaaagaaacccagcaaagtcctctctgagccgctagagtcaacaagcttttcatacacactatggagagcccacgccccacataacccttgagaacacagttccatgtcttggctaacacggctctcaccgctggcctcaacacccctgggccatgctccctctgctcttccatccccaccacaacgaagaaaggtatgaccgcacgttatatatagtaaagaagaactttgaggccgcaggacagggccgcagcagcaagctctctgggtagtgccttactgctccacccacctgagccctgttccaagtgcaaggagcttcccaaatcctagagaatgattgtacttagaaagttttgttttgtttaagagaaaatggctttacatgaatttatgttcctcatggcagatatgttacacttccctctaaacagaaagacaagcccaggtggggcccgggcatcctcgaggaatgaagcagccattcccaccacctctcagggactaacaggtgcatgtggacacttgaaccacgactgtgtccacagctcctcctggaccaggcctggtgcctgagtgtgaagactcctggcctgcgtggcaggggcagctatctgggagggctaaacagcctggaggctgagtctgcagaggaagggggacctgaaagagcccaggtacaggtgcccatcgtgttcgtgcacctcgctgatgtaggtggccaccagcccatcgggatcatgcaggcttctccggaaggcaccgctgtcgctgagttctaggacgaggctgtaccgcggcacaaacttcatcaccgtctcttgactaaagagcagatcacaaccagcgcagcttcccttaaaaatcatccttttaatccagggtctctcagataagaaatccagcatggaaaacccagggttagggcggatggtcgacatgcccacccagtaccccccagagctgctgggccggatgttgtctggaaatccaggcatgttctccacaaacagatcagccccgcccttcatcaggccagaaacgtagactcttcgtatcctggccatggttgtttctgccaccaggacaaagtcttctgcaggagacagctggactccattcgggaaccgcagctggtccaataaaacttttacttccctggtcacagtatcatactccagcaggcgcccgtcatctgtgccctccatcaccagaagcaggtagtctcgtctttgccatttgctgctagaatcggtgaaataaatcttcctcccatcctgagtgactgtaagatcattcacaaaggacatgttcttcccctcaatgggtgtctcggaggacagcagcagtttcacttcacgtttccagggatttacttcaaatagtcccttgtatgcatcggccacaaagagagtcccattgggccctgcacggatacccaggggtctcccacacacaggctcatcatctcgggttttgcaagggcccgaaccaaaccgggcaatggtctctatttcaccattttcaagttttacgacccggccatctgctgtcccagtaaacatcacatccccaatatgtgctatggactccggtccaacaagttgattttcaaacagcctttctgcctgtcgcagcttcgtatttggatgcagaacaccaagcaagagcgggggttctttgaagctgagaggctgtggatctataggagattccagcagcatcatggctccaagcaggggaacggtgagagaaacagccagcatcaagaaggtcactcggaaaactctgccgctaaaggagctgccgtccttagcctccggggcctggccatcatcgtctgtgacgacctgcggccgcaggggccggcgctgtcgcagcccgtccgcctcgctcatggtacgggcgccagcctcaccacgcagaaaccacctccctcggccgattatacacccagtctcgtacctagccctaa

SEQ ID NO: 13772 - DNA, 1022 bp, Homo sapiens
  misc_feature 1, 2, 3, 491, 494, 635, 667, 710, 721, 768, 776, 805, 822,886, 889, 910, 935, 1015, 1016, 1017, 1018, 1019, 1020,1021, 1022: n = A,T,C or G
nnnatattttttttttttttttttttttttgaggctaaaatcatttaattatacacaggccacaattgcaggatggaaaggcagtgggcacttggaagtgactacacatggcaataagcagcctatcttctttaccaaccagaagtttcttggggcatgtgatggtaggccagaccctttccaagggaataatactacactaagcctacactgtactgtgagagtcatggtggaacaaggccacaggcagtgggaggaaatgtgatgactcactgtgtcagaattctaaggcccagcatgatcaggatgtaaggctccataattttctaaaccagaaattatgagaagaacaaaattctgcaatcacttatgttttttttcttcttttttttttttgagacagagtttcactcttgttgcccaggctgggagtgcagtggccaatctgctagcacttgggaggggagcatgcagagtgtgtatactggagnggnacacatgttcacttgaggtattctttccttaccagggaaatgtccctggaaggtcatatatcaattaaacttcaccacttcacctcttaatgcacatacttgagacgacttgcccaactcctgagatattattgggaagcngtgcgtcaccagtttcaggttctttctaccgnttaggggactgtttttacctggggcggtgaccagtcactattntagagaaacanaaaaaaactccctgaccatcacctgatgattgcctgacattcctggngaggggcngggggcctccctagcactgttcttgcttnactaggtacctactgtnacaggttcacttcagctctagtcaatggtcagagtgcccctgttccaaatggcggtggctctcntancacctaaattgcttcattttncctgctgcccagacaatgctgattnatcaagacggggatattgcaatagagaacagtttaatatacatagagctggctaacaggagactggggatttattatacnnnnnnnn

SEQ ID NO: 13773 - DNA, 365 bp, Homo sapiens
  misc_feature 364, 365: n = A,T,C or G
acgcgggtcagtcattggttcattgctgacaaagtcacttttaagtcatgttgtagaagaactaccaagtgtggcaggacaggcatgtggcaggactgtttctgagcacagatgaatggatgagcacctggccccactgtgcccagttggtctagcttcccacttggccacctacgggctgctgtgtggaccttgtctggcactctcctttaattgattttttattatttctttcttttagagatggagccttgctttgatgaccaggctagagtgcattaggaatgatctcggctcactgcagccttcacttcccagggtccagcgattctcctgcctcagcctgccaggtagctgggatcann

SEQ ID NO: 13774 - DNA, 372 bp, Homo sapiens
  misc_feature 367, 368, 369, 370, 371, 372: n = A,T,C or G
acttttttttttttttttttttttttttttctttccttagtcttgagcatatgtgaaaaaaagaaaaactaaaataaaatatttttttaaaatctccgtctcagtagaagtctcttctcattaattttcgcttttaatcttaagacttaatttttcaactcaagaacacttttttctcttcagttgtatcttcttctccagcactttggtttcttccctgggaatatttacatactcacagacttggtctctttgtttagagctactaagttttagggcgatttttttctgtagcaatagagaatacagatgacctattgccaaaattttctcaaactacaaggctggtagaaccgcacttgacaannnnnn

SEQ ID NO: 13775 - DNA, 539 bp, Homo sapiens
  misc_feature 528, 529, 530, 531, 532, 533, 534, 535, 536, 537, 538, 539: n = A,T,C or G
actttttttttttttttttttttttcacatctgttttgtgacttcttcagattgaatatctttaggaattggggaaaatgagcttttagtataaattgcctataattttcatttctgtgtctaaaagagtccacaatatatcagcctgagattatgataagctttgaattacaacgaacttttcttttctgactgggattaggacggttgctcatgggttgattggaagatggtgccaggcctgtgagttcctgtggccatttgttggaaccctgttttgccacagaacagaactggtatcctagagatgccattagtaatgaaattacaaatgaacgaattcataaaagcatacagtctcatctgtaagctataaatacctatcaaaatgaaggaatgattgttgttaacattggtcaataacccagatggatgggaggaagggatcccctgactgtccatcctggtgactgccattgtgctaagtcacgaacagcccgcgttaattaattctagaagacttccgannnnnnnnnnnn

SEQ ID NO: 13776 - DNA, 920 bp, Homo sapiens
  misc_feature 1, 916, 917, 918, 919, 920: n = A,T,C or G
nccgcaaaaaaaatctatgtgttcctaacagtgctagatacttgggatatagtgatatagggaggaaagaattgagcaacaataccaaacaaaaaatttctactccaagacctcaggttatgggtaagacagatgtaataaatagataataaaataggcaagtagacaatttgcattcactgtgattagtgcctatctgtggagatcatagcggtagaggacttgtcctagatttcagggagcagaccggcttcatggagaacctggagaacctatgtaagaattaagtcagaggttttttcaaaatacatgtataatgtcttctagaagaggaagaatggctaagaaagcaagaagactagagtttggagtgagtggaactgatttaatttttacaaacaaatttttcagattgcattggtaagtataagtacctgagtcctgtgtggtggggatttaaaaagtagttcataaaatactcagcatgaaaaaaaataatgagagagacaaaaatggtatgatgaatggtaggcaaagatgcttggttaattacagtagaaattacaatcagttaactctcagttcagtcctgtgaattaggccgactttttctacagaatcactgagcttcagctcaaacttgagagtgcccttactgaactagaacaactccgcaaatcacgacagcatcaaatgcagcttgttgattccatagttcgtcagcgtgatatgtaccgtattttattgtcacaaacaacaggagttgccattccattacatgcttcaagcttagatgatgtttctcttgcatcaactccaaaacgtccaagtacatcacagactgtttccactcctgctccagtacctgttattgaatcaacagaggctataaaggctaaggctgcccttaaacagnnnnn

SEQ ID NO: 13777 - DNA, 1591 bp, Homo sapiens
  misc_feature 1, 2, 1590, 1591: n = A,T,C or G
nncaaattatgatatgaacagtggtgaaaaagcaggctggtaccggtccggaattcccgggatatcgggcgtggagagggagtgatgtcttccagactcggtgctgtacccgcctagcaggacccagtgctccataaaggataatagtttccagtacactatccctcatgatgactccttaagtggttcatcgtctgcatcttcgtgtgaaccagtgagtgattttccagcatctttccgaaaatctacctactggatgaagatgagaagaatcaagccagctgctacttctcatgtcgaagggtccggtggagtatcagccaaggggaaaaggaaacccaggcaggaagaagatgaagactatcgagaatttcctcagaagaagcataagctttatgggaggaagcaacggcctaaaactcagcccaatcccaaatcccaggcccgtcgtattcggaaggaaccaccagtttatgcagcaggcagtttggaggagcaatggtacttagaaatcgttgataaaggcagtgtctcctgccctacctgccaggcagtggggaggaagaccatagagggtttaaagaaacacatggaaaactgcaagcaggaaatgtttacttgtcatcattgtgggaaacaacttcgttcactggcagggatgaagtatcatgtcatggcaaatcataatagtttgcccattttgaaagccggagatgaaatagatgagccaagtgagagggaaaggctccgaacagttctaaagagagactgggaaagctaaagctacaggtgcctgcgtgagagttgctcccagtaggcttcaccagcatcatgggttttctctaccctggtcggaaattgtgggcaagggggctgtcagacctggaaaagatggaccctgaaatgttcaccactggggaaaaccttataggtcgaaggctggacttgcatatcacctgaggtcagagcatgggcctatatccttctttccagagtcaggacagccagagtgcttaaaggagatgaacctagagtcaaagagtgggggccgagttcagagacgttctgccaagatagctgtataccacctacaggagctggcctctgctgaactggccaaggaatggccaagaggaaggtgcttcaggacctggtacctgatgatcgaaagttaaaatatactcgtccagggctccctaccttcagccaggaagtactacataaatggaagaccagatatcaagaaatatccatcgtattcagtgtcctaaccagggtgtgagctgtctacagcagtgtattctgggcttaagtcacgggtttgtacatggggaacttgtggtgggaatccaagttttagtcgaaggaatggtttgaaacggggtgcggttcattaattggcaggtgggggagttggggtgaccagaaacaagttgaaagtgagaaaaagggggataaaagaggcggcggggagattttaaggaagggtttatccaagagtatagggagaagaagagatgaggtgtgaaagaagaggaaacgaaagagaggagtagagtgaggaaggagggtcgttttatcatttaatcnn

SEQ ID NO: 13778 - DNA, 1946 bp, Homo sapiens
atcgaccacccgtctggcaaggttgattgtacacagcactatgaactctgccaatcttgacagtttcggaatgttcaagattggcaaggttgattgtacacagcactatgaactctgctccggaaaccaggttcgtggctatcccactcttctctggttccgagatgggaaaaaggtggatcagtacaagggaaagcgggatttggagtcactgagggagtacgtggagtcgcagctgcagcgcacagagactggagcgacggagaccgtcacgccctcagaggccccggtgctggcagctgagcccgaggctgacaagggcactgtgttggcactcactgaaaataacttcgatgacaccattgcagaaggaataaccttcatcaagttttatgctccatggtgtggtcattgtaagactctggctcctacttgggaggaactctctaaaaaggaattccctggtctggcgggggtcaagatcgccgaagtagactgcactgctgaacggaatatctgcagcaagtattcggtacgaggctaccccacgttattgcttttccgaggagggaagaaagtcagtgagcacagtggaggcagagaccttgactcgttacaccgctttgtcctgagccaagcgaaagacgaactttaggaacacagttggaggtcacctctcctgcccagctcccgcaccctgcgtttaggagttcagtcccacagaggccactgggttcccagtggtggctgttcagaaagcagaacataccttcacggccgctgctggagcttctgttgctgtgaatacttctctcagtgtgagaggttagccgtgatgaaagcagcgttacttctgaccgtgcctgagtaagagaatgctgatgccataactttatgtgtcgatacttgtcaaatcagttactgttcaggggatccttctgtttctcacggggtgaaacatgtctttagttcctcatgttaacacgaagccagagcccacatgaactgttggatgtcttccttagaaagggtaggcatggaaaattccacgaggctcattctcagtatctcattaactcattgaaagattccagttgcatttgtcacctgggtgacatgaccagacaggatgtactaggcctgggtatccagcgaggctctgcatccctgctgtagggccctactagagtctagagtttctgattctgtttctcagtagtccttttagaggcttgctatacttggtctgcttcaaggaggtcgaccttctatgtatgaagaatgggatgcatttgatctcaagaccaaagacagatgtcagtgggctgctctggccctggtgtgcacggctgtggcagctgttgatgccagtgtcctctaactcatgctgtccttgtgattaaacacctctatctcccttgggaataagcacatacaggcttaagctctaagatagataggtgtttgtccttttaccatcgagctacttcccataataaccactttgcatccaacactcttcacccacctcccatacgcaaggggatgtggatacttggcccaaagtaactggtggtaggaatcttagaaacaagaccacttatactgtctgtctgaggcagaagataacagcagcatctcgaccagcctctgccttaaaggaaatctttattaatcacgtatggttcacagataattctttttttaaaaaaacccaacctcctagagaagcacaactgtcaagagtcttgtacacacaacttcagctttgcatcacgagtcttgtattccaagaaaatcaaagtggtacaatttgtttgtttacactatgatactttctaaataaactctttttttttaaaagtctggtctttccttcaatgttacagcaaaacagatataaaatagacaataaattatagtttatatttacaaaaaaaaaaaaa

SEQ ID NO: 13779 - DNA, 1572 bp, Homo sapiens
acaaaaataccagtgcttgttatactagttactaaaagaagaagaaactcaaaattcctatctgcgtgctaatttgaaaagaacaacgtagatagatttgttggcacatatatatggcatattcacatatggcatatatacatatggggagaaaacatgaaccaaaggccaattcagttatgggagctcatctccttccatctctcctaatcaagagcaaagggaacagcaggcctaacagcagggttgggaaggcaaaaggactggcactgaactaagtgaaagggcgtctggtctattcagaggaagaggctggaatggcttaacaatagcaggcatttataagtgcccaccctcaccaatgcatcgggggtggtccctagatatgaaaggtgaggaagtctctgcatactgtgatggtacctcggccgaggtcccaggtctcagcctgccctaccttcccaggctccagtccctgttcctcagcatcccccaccacatcctgagtaagctttgtccccagataacctcttcagcatgatccttaaatctccctaagcctcagtttctcccctgtggaatgggggtaagaatctctttctctgaatgcccctgtgttaggaaataatttagaatacttcggaaacaaaaagctctgttcacacctaagcaatcagggcagtggccctggccttgccaggaacttaggcttttatctggatcctctttccaggcctctcaattaattccccaggtccttaacccttgggaaattagaaattaggaagagtgtcccacttctgacactgtgttccctcttggaacctgaccgtcaatgctagaagaacccttggaaaacatgctggcccagccctctagttttacaaataagggagtgcacagccctgagaggttacatggcctgcccaagatcacgcagtcaatggcagagtaaagagcatagcctaggcctccccactcctctagtaatgctctttcatcttctccaacctggctctaagccttgtccatcctgagccccatatctagcccaacctagtccctgaaaacaagaagtggcccttagaaatctctctccagtcccactatcagaggccaactgctgtcttccagtctccttcagcctgtgctcctctccctccctgactgacaggcagaaggtaccgtgcctctggatatccccacagtgccctgagctgcatctcttgccgactgctttaatacatcacagtgacattgtgtgtgtctctgccaccagactattgctccttgatgctctgggtcacctgcatctagcatggcatatatctagtgctcaataaatgtgtattgtacggaattgactgaacttctctcactggcagccccctctatccaaatcacccacctcttttttaaggtgggtgatgatcttgtgtggtactgaggtgacctctccatgactggtccaaagggcaggcagggttcctgatactgagagaaaagtataccaaccaggaccttagctgcctatccatacgtagttgcaacacattcctgcctatctcctgc

SEQ ID NO: 13780 - DNA, 417 bp, Homo sapiens
  misc_feature 1, 2, 3, 4, 5, 6, 7, 8, 9, 10, 11, 412, 413, 414, 415, 416,417: n = A,T,C or G
nnnnnnnnnnnctcctctaaaaggaaacccccatcccttaagcagatactctccattccttccttcctccagcccccagcaaccaccaatctgctttctgtctctatggatttatctattcctgctattttatataaatcgaattgtatgagaccttttgtgtctggcttctttcacctggtgccgcggccgcccgggcaggtacctaacctacctttaagactgggataactattggaaacaatagctaataccggatatagttatttatcgcatgatgagtaatagaaaggagcttcacagcttcacttaaaaatgggggtgcggaacattagttagttggtagggtaatggcctaccaagacgatgatgtttagccgggccgagaggctgtacctcggccgcccccgcnnnnnn

SEQ ID NO: 13781 - DNA, 2937 bp, Homo sapiens
atctgagggcaagaagaacgatttgcagaagctcccagttttcttggctgtggcacagtcgctttgagggccaggttccttcggcttcctcccgactcccctgcttccccccgtaggattcccgttggtatcgtccgagccccacctccctcctcttcgcccccgcacgccgaaaacaggggcctctcacgtgacccctgcgcgctcccgcgggggagcgtagtctcggaggcggcgccgcaggggattgaggggttgactgagcgttgcgagccttagctttctcccgaacgccagcgctgaggacacgatgtcgcggctctcccgctcactgctttgggccgccacctgcctgggcgtgctctgcgtgctgtccgcggacaagaacacgacccagcacccgaacgtgacgactttagcgcccatctccaacgtaacctcggcgccggtgacgtccctcccgctggtcaccactccggcaccagaaacctgtgaaggtcgaaacagctgcgtttcctgttttaatgttagcgttgttaatactacctgcttttggatagaatgtaaagatgagagctattgttcacataactcaacagttagtgattgtcaagtggggaacacgacagacttctgttccgtttccacggccactccagtgccaacagccaattctacagctaaacccacagttcagccctccccttctacaacttccaagacagttactacatcaggtacaacaaataacactgtgactccaacctcacaacctgtgcgaaagtctacctttgatgcagccagtttcattggaggaattgtcctggtcttgggtgtgcaggctgtaattttctttctttataaattctgcaaatctaaagaacgaaattaccacactctgtaaacagacccattgaattaataaggactggtgattcatttgtgtaactcactgaagccaaaatactatcttttaagatgtcccacatggaagacgctattccaggatctttaaatttccatggatgcatataggatgtttgggagcatcatccgtgaagaaaaaatcaattaaatcattgtgttcaacaggaatatttaaaatattctgcatgaatcctgtggctgtcttattttaaatagctgctgctgtgggattatattttttttccttaacatgccaaatataactttctgaaagtgatggaaaatgttgtcttgtgcagacaacatcatggctcttggcagtttaaatttagtaattttaatttagtgaacagaattgagaagaacgtgccaaatgagaatcaattaggtggatttttggctgtcatttcaaaagtggaataaatttattaatttagtagtactaaatggtatccttagattaaaattttgtgcttgataacagctgttttttctacattagaaataagatgccacacaaggaactacattccagatttaaagaaatgaaaggataccattagtgtgtataacagattattgttcatacttgtaaagcaccttatgtcattgagaatataaagaacagtgccttagaagacagtgaaaggtaagctctagcttaatgtctatgatttgttctttgacattaaggaaggtaaggattggtcagaggatgtaacttgatgtgagcagtagtaaacctgttttagatatcatactgttaatattttattgaaaatttatttcagagcggagaaacttaagctaaagtctgttatacagaattgaaagccttcgtatcttgaacctcccaacatttttcttatggctgttgaaaagtatagagctaaattgatttaattacactttcctttgtactttaaaaaaaagtatgctagcactattgtaccttgaaaggatttccaccagactgtcttgagtagtgacttctttggtgaggcaagaaggatatacattattttagaatcatttactatttaaatgagacaatcatattattttagaatcatttattttaaatgagacaatcattttaagttttaagataacagaagtgaccaatgtaatttcacaacacctaaggattttttggttgatcaggttactgtagatttttactgattgtcctggatgaatagactgtgctttttctttttctctcccttccttcttggtttcccatagtataataagcatgcatactttaacttctatagttttctcctttagagggtcgtcttcagttttagaggtttacttctcccttgcctttgactcattggactagtgcagaggctttaagtagtttaaaatgggcttttgcttttctaggtcattaacgttttttatttagtttctttagtcaatagtggctgagtttcgcacttgattttcaatattttatagtaagaaatgacaaactgctttggttcatttcataaacaaactctgcatttagataactattaaaggttgttaagatgaagatttactgtttcttgtgttactcgtggtacagctgtttgttttacttgcacatttgtacatatacttaatgttttcaagtgccttaattgtttaaaatctctggcttcaaagtttctgtggggaaaggtcggtttacctcacattttttggtctccattagtatattctaggtacctcacaaaatgtttatggtgccatggctgtagtttcagtgagtgctgtaggattaattcgaaaataggcagaattcccattcctcccaagggtggcaaaattagtatactgatgtatgtcattacccggttgattccttgacacttttgtcaactttgtggcatttgggaactaccttgagctttgttttgggcgcttaaaccagtattaaagtgatgggtctaaaatgtctgaaaacacctttttccatacaggtctggccattgggtcacccggtaaccaatc

SEQ ID NO: 13782 - DNA, 2804 bp, Homo sapiens
  misc_feature 1, 2, 2798, 2799, 2800, 2801, 2802, 2803, 2804: n = A,T,C or G
nnatagggagtcgacaccgcgtccgatgggatgggaggatactgactaagtctgagaaggaggagaaagaaaattagctacaggaagagtttatatccccttctacaagaaaacttaaatatagctaccaccgctttgaaaggaatggtttgtgtccaaacagcattttccagacaagctctgtacttttttgccaaaagaattaactttaaactgaaggcagtggacagttaaacaagagtcggcactgggaacagctgtgcgtagaccagaccagtgacttataaggaggcgatcgagatcggatgacagcaaatcatgagagctacctcctcatggcaagcacccagaatgatatggaagactgggtgaagtcaatccgccgagtcatatggggacctttcggaggaggcatttttggacagaaactggaggatactgttcgttatgagaagagatatgggaaccgtctggctccgatgttggtggagcagtgcgtggactttatccgacaaagggggctgaaagaagagggtctctttcgactgccaggccaggctaatcttgttaaggagctccaagatgcctttgactgtggggagaagccatcatttgacagcaacacagatgtacacacggtggcatcacttcttaagctgtacctccgagaacttccagaaccagttattccttatgcgaagtatgaagattttttgtcatgtgccaaactgctcagcaaggaagaggaagcaggtgttaaggaattagcaaagcaggtgaagagtttgccagtggtaaattacaacctcctcaagtatatttgcagattcttggatgaagtacagtcctactcgggagttaacaaaatgagtgtgcagaacttggcaacggtctttggtcctaatatcctgcgccccaaagtggaagatcctttgactatcatggagggcactgtggtggtccagcagttgatgtcagtgatgattagcaaacatgattgcctctttcccaaagatgcagaactacaaagcaagccccaagatggagtgagcaacaacaatgaaattcagaagaaagccaccatggggcagttacagaacaaggagaacaataacaccaaggacagccctagtaggcagtgctcctgggacaagtctgagtcaccccagagaagcagcatgaacaatggatcccccacagctctatcaggcagcaaaaccaacagcccaaagaacagtgttcacaagctagatgtgtctagaagcccccctctcatggtcaaaaagaacccagcctttaataagggtagtgggatagttaccaatgggtccttcagcagcagtaatgcagaaggtcttgagaaaacccaaaccacccccaatgggagcctacaggccagaaggagctcttcactgaaggtatctggtaccaaaatgggcacgcacagtgtacagaatggaacggtgcgcatgggcattttgaacagcgacacactcgggaaccccacaaatgttcgaaacatgagctggctgccaaatggctatgtgaccctgagggataacaagcagaaagaacaagctggagagttaggccagcacaacagactgtccacctatgataatgtccatcaacagttctccatgatgaaccttgatgacaagcagagcattgacagtgctacctggtccacttcctcctgtgaaatctccctccctgagaactccaactcctgtcgctcttctaccaccacctgcccagagcaagacttttttggggggaactttgaggaccctgttttggatgggcccccgcaggacgacctttcccaccccagggactatgaaagcaaaagtgaccacaggagtgtgggaggtcgaagtagtcgtgccaccagtagcagtgacaacagtgagacatttgtgggcaacagcagcagcaaccacagtgcactgcacagtttagtttccagcctgaaacaggaaatgaccaaacagaagatagagtatgagtccaggataaagagcttagaacagcgaaacttgactttggaaacagaaatgatgagcctccatgatgaactggatcaggagaggaaaaagttcacaatgatagaaataaaaatgcgaaatgccgagcgagcaaaagaagatgccgagaaaagaaatgacatgctacagaaagaaatggagcagtttttttccacgtttggagaactgacagtggaacccaggagaaccgagagaggaaacacaatatggattcagtgagcctgctttcgcctgctgtctctgatggctctggcaaggactccagggattctggtgggatatgacttagaaccaggtggctggtcacctggatgtacagaagtctaactggtgaaggaatatcatttacagacattaaacatccatatctgcaatgtgtaccaaagttatatcatgccccataatgctactgtcaagtgttacaactggatatgtgtatatagagtagtttttcaaaagtaaactaaaaatgagaagcatatttcaagaattattttattgcaagtcttgtatttaaatgttaaatcaatatgttgttgcaatttagcttgctttcaagcttcaccccttgcacttaacataagctatttttggcattgtgttatcatcggcttattttatagatcaatatttttatttcccttttttgctgaggaaatgaagataagcaaaaatataaatatatatataaatatatgagttattaaaatcagaagaataaaaaaaaaaaggcgcccactactaggccgnnnnnnn

SEQ ID NO: 13783 - DNA, 561 bp, Homo sapiens
  misc_feature 1, 561: n = A,T,C or G
nccactaccgcaggcactagatacgaatctaaaattaaaacaaatccaatttattaaacacgcaattttttgagagtttgatcctagctcaggatgaacgctcgctgtgtgcctaatacatgcatgttgaacgggatgtagcaatacattcagtagcgaatgggtgagtaacaggtacctaacctacctttaagactgggataactattggaaacaatagctaataccggatatagttatttatcgcatgatgagtaatagaaaggagcttcacagcttcacttaaaaatgggggtgcggaacattagttagttggtagggtaatggcctaccaagacgatgatgtttagccgggccgagaggctgtacctcggccgcacactgggactgagatacggcccagactcctacgggaggcagcagtaaggaattttccacaatgagcgaaagcttgatggagcgacacagcgtgcaggatgaagttcttcggaatgtaaactgctgttataaggggcatcagatctcgagaattccgctagtagtagtagacaaccgctctan

SEQ ID NO: 13784 - DNA, 2218 bp, Homo sapiens
  misc_feature 1, 2, 3, 25, 2217, 2218: n = A,T,C or G
nnnccggcggaaggctcccccgggnattcgcctcagcagcgaggcggcggcggcggctgcggaggcgcaggcagcaactgaggcagcggcaggctcaggtgcagccgctgctcaaagaaaatgaacggcaccctggaccacccagaccaaccagatcttgatgctatcaagatgtttgtgggccaggttccaaggacctggtctgaaaaggacttgcgggtatccagcaatatgctgctgctgcgctccccactctgtacaaccagaatcttctgacacagcagagtattggtgctgctggaagccagaaggaaggtcagagggagccaacctgttcatctaccacctgccccaggagtttggtgatcaggacctgctgcagatgtttatgccctttgggaatgtcgtgtctgccaaggttttcatagacaagcagacaaacctgagcaagtgttttggttttgtaagttacgacaatcctgtttcggcccaagctgccatccagtccatgaacggctttcagattggcatgaagcggcttaaagtgcagctcaaacgttcgaagaatgacagcaagccctactgagcgtgctcccctctgagactggagtgagagggtcttctggcacagcttgccctgaagactcggctactgccttctgtgggagtttcgcttcgtacagaggacaagtttgtgctttggtttccagtgttttactttggagtttaggtgccatatcctgaggttttttttgtttttgtttttgtttctcctttatttaaagtttgctgtgtttgtaaccagtgtgtgttgagaaggaccaacaccaaaccaccctggggaagggggacagggaaacatttaacacagacgatgatcaggatttgccccaaaccaccccaagagagaggactgagtggaacaaaaaagtgacccccagaacctctcttagtgtgagggtgggtagaatgagaactgacacctgggagctgtggggagcagagcggctttggggaagagtggagtgactagacacctaatgccctggcagctggagactcaaactcctgtacagctaccttctgggaaatagtttttgacacctatttttcagattcttgtccggaatttctgctgctcttttcaaaaaagggcattaacaattctctggaaataaagcacctgttagcctgacatatgcaaaaagcagggcggcatcacccattacgagctcccccagccagcagtcagtattggattggccttgcctggctggtggcagtttgggagaaacagccaaagaggttagtttatttcaacaccaaattagaccatggcccatttccaacgggtctctttaaaggcctctatggaatacattgcctggtttccttctttgcagttcaccacagcaaggaatgtcacctccatcccaagccaccattttctcatgaaggcaaatccaagaagggcttgcagttcttgctgaagggggtaccatttgtgggcagagtgatcaataccatctagttgggggaggaggagcttatttcttggtgtacttgaatcagaaggtccctgcaagccagtatgcttcatttgccagtggccagaaattctcccttgcctccttgattgaggtgtcccagatgtagtattcccacaggggtctggcaggcccctcctgtaaccactccagtcacattttctgctcttgaggcagaggtgacatcaggacgtttacagcctccacatgaattgagtgttcatttacctcagtattaccgtgttcatttttgtcctcgtgctacagttagctccctgccgcctcttgcaggtcttacttcagctcttgcctgtgacccacacagcttctgggctctgcctctgctctaagaagtgctgtgggggtagagaaccaggaaggacatgctgttgggaatgtacacctgggcagaggtggcctgttaagatgtgactgtagcacagcagggatggatcccgggtcctggatctgaacctcaaatacagtcgaccctagcggagatagatcaaggggggtttgcataagcacgaggggcccctgcagcggccgggacacggttgcacccgggccgagcggggggtatcccgagggaggcccagaaggcggccaggggaaccagcacaaagcggagctgaactgacgggcaaaaaggggcggccgcttctcgcann

SEQ ID NO: 13785 - DNA, 442 bp, Homo sapiens
tatagggagtcgacccacgcgtccgtgtatatatttattattttcatataatttgccagacagagatcagaattgaaccgtcaatgtgaaataaagagttctccttgtacttgaataataaccacgattccaacccaggtctgctttggggcttatcagaactcctttctaaggagcactagaatgagaaatcatgttgttcgatcgtttcacatctgtatatcagctctaaagcagagatgtattatggtgatactccaaggtggcatagccattcatttacaacttccagatttgagctgcctggagggaatccatatcagctctgcataagattatatacaaagctgtcactcacaaaaggctgggatgtgctttcatccaactggaaggctttattcttccaagttcattcatactcaaagaggccagtactttgcca

SEQ ID NO: 13786 - DNA, 578 bp, Homo sapiens
  misc_feature 407, 408, 409, 410, 411, 412, 413, 414, 415, 416, 417, 418,419, 420, 421, 422, 423, 424, 425, 426, 427, 428, 429, 430,431, 432, 433, 434, 435, 436, 437, 438, 439, 440, 441, 442,577, 578: n = A,T,C or G
ctgtatctcatgtttgctgatggcagtttgtgggagagggaaccatttcagcaatgatttcagttagcaaatagctttgcagctttaacagaactctctctgcttgcttttttatttcctgggttttctggccaggcgcggtggctcacgcctgtaatcccagcactttgggagtctgaggtggacagatcacttgaaaccaggaagccaggagttcgagaccagcctggccaacatggtgaaaccctgtctccacttaaaaaaaaaaaaaaaaaattagcctgtaattccaactactcgagaggctgaggcacaggaatcgcttgaacttgagaagcagaggttgcagtgagccaagatcgcaccactgtgctccagcctgggcaacagagcaagactccatctcnnnnnnnnnnnnnnnnnnnnnnnnnnnnnnnnnnnngagcaaactatttccaaataccatagaataacttacataaaagtaatataactgtattgtaagtagaagctagcactggttttattaatttagtgactattcattttatctaaatcagtgaagatttactggcann

SEQ ID NO: 13787 - DNA, 2825 bp, Homo sapiens
cgtccggcggcgcagctggggtcgcggccctgctcccggcgctttcttaaggcccgcgggcggcgcaggagcggcactcgtggctgtggtggcttcggcagcggcttcagcagatcggcggcatcagcggtagcaccagcactagcagcatgttgagccgggcagtgtgcggcaccagcaggcagctggctccggttttggggtatctgggctccaggcagaagcacagcctccccgacctgccctacgactacggcgccctggaacctcacatcaacgcgcagatcatgcagctgcaccacagcaagcaccacgcggcctacgtgaacaacctgaacgtcaccgaggagaagtaccaggaggcgttggccaagggagatgttacagcccagatagctcttcagcctgcactgaagttcaatggtggtggtcatatcaatcatagcattttctggacaaacctcagccctaacggtggtggagaacccaaaggggagttgctggaagccatcaaacgtgactttggttcctttgacaagtttaaggagaagctgacggctgcatctgttggtgtccaaggctcaggttggggttggcttggtttcaataaggaacggggacacttacaaattgctgcttgtccaaatcaggatccactgcaaggaacaacaggccttattccactgctggggattgatgtgtgggagcacgcttactaccttcagtataaaaatgtcaggcctgattatctaaaagctatttggaatgtaatcaactgggagaatgtaactgaaagatacatggcttgcaaaaagtaaaccacgatcgttatgctgagtatgttaagctctttatgactgtttttgtagtggtatagagtactgcagaatacagtaagctgctctattgtagcatttcttgatgttgcttagtcacttatttcataaacaacttaatgttctgaataatttcttactaaacattttgttattgggcaagtgattgaaaatagtaaatgctttgtgtgattgaatctgattggacattttcttcagagagctaaattacaattgtcatttataaaaccatcaaaaatattccatccatatactttggggacttgtagggatgcctttctagtcctattctattgcagttatagaaaatctagtcttttgccccagttacttaaaaataaaatattaacactttcccaagggaaacactcggctttctatagaaaattgcactttttgtcaagtaatcctctgcagtgatacttctggtagatgtcacccagtggtttttgttaggtcaaatgttcctgtatagtttttgcaaatagagctgtatactgtttaaatgtagcaggtgaactgaactggggtttgctcacctgcacagtaaaggcaaacttcaacagcaaaactgcaaaaaggtggtttttgcagtaggagaaaggaggatgtttatttgcagggcgccaagcaaggagaattgggcagctcatgcttgagacccaatctccatgatgacctacaagctagagtatttaaaggcagtggtaaatttcaggaaagcagaagttaaaggcaaaattgtaaatcagtcgagatcgggtgccttcagggtggtatggctgtataccaaaattgtaaatcactacatgaagcttatatattggtttggcctgaaaggtgaagtggggtaggcagggggcgggcttacaggttatggtggattcaaagactccctgatttgtgattggttaaggaagcaaagctttgtctaaaaacttggggtccgcagaaaggaacattaaggtctggccaggcccctcaggaagaaactgagagcaaagaatggaggtcagagtttagtccctggtgttcccccttatctgacgtctgtgtgaatccatttggtgggggtctgggtttctgaaaagtagctcaggggcacgtgttaaggatgtctctaggtgactctaacttccctggctattgtttgaaactgttatgaccttcttgcttatcagcttgctggtttccttctcggggcgagctgggtgcctggagttttcggtgaaggaaactcaagattctcctttatttctgtgcttgtgggaatccccctggcacaccccaaagaggggtccctgctccgtctcacagggatctttttgtatatttggcttagcatcatacatttgccatgttgtttcatcatctgcctaatttactgtttttgaatatttcatttgtttctaattgttactacagataatgctggggtgagcaactctgtgtacataggtttatctcctattggaatattttctttatataggcgttttttttttttttctttttttttggagacagagtcttgctctgttgcccaggctggagtgcagtggcgcgaccggagctcactgcaacctccacttcccgggttcaagtgattgtcccacctcagcctcctgaatagctgggattacaggtgcatgctaccatgcctggctactttttgtatttttagcagagacagggtttcaccatgttggtcagggtggtctcgaactcctgacctcaagtgatccgtctggctcagcctcccaaagtgctgggattacaggtgtgagccactgcacctggcctatataggcttttttcttaaacctatttagtaatgttttcccaagttcattttctattttgaattgtttccccaagtttattattctattttttttgcatggaaaaatggggtaacttagcagtttcaatattgaagactgaagtttaaaaaacatttaaattcaa

SEQ ID NO: 13788 - DNA, 2063 bp, Homo sapiens
  misc_feature 1, 2, 3, 4, 5, 6, 2062, 2063: n = A,T,C or G
nnnnnngaccacttagtcagctcagcattggtagctcaggctctttgtgtagtgtttttagaaaacccacccagtacagtgtaggaagattaacgtcatggagtcgctctgatgggagaggagacaagatacattcaaatcataagccatcggaaaccagtactgatgtacaccaacatgttccagaagacccaagagaaaaatcacaagatgaagtcttgagagatgaccctccaaaaaaagaacatctacgggatacaaagtctacatttgctggcagtccagagcgtgagtccattcacatcctgagtgttgatgagaagaacaagttgggagccaagattatcaaagcagagatgatggggaatatggaattagctgaacaacttaaagttcaacttgaaaaggcaaataaattcaaagaaactataacacagataccaaaaaaatctggggtagagaatgaagaccagcaagaagtaatccttgtcagaacagatcagtctggaagagtatggcctgtgaacacacccggaaaatctctggaatcacaaggaggaagaagaaagagacagatggtttcaacccatgaggaaagagaaagggtcagatactttcatgatgatgataatctaagcctaaatgatttagtcaaaaatgaaaagatgggaacagcagaaaatcaaaacaagctctttatgagaatggcatctaagtttatgggaaaaacagatggagactattacaccctggatgacatgtttgtctccaaagcagctgagagagaacgtcttggtgaagaggaagagaaccaaaggaaaaaagctattgctgagcatcggagtcttgctgcacaaatggaaaaatgtctgtattgttttgacagctctcaatttcccaagcatcttattgttgcaataggtgttaaggtttatttatgtttacccaacgtacggtctcttactgaggggcactgcctgatagtccctttgcagcaccatagagcagctactttgttggatgaagacatctgggaggagatccagatgttcagaaaatcattggtaaagatgtttgaagataaaggattagactgcatttttttggaaactaatatgagcatgaagaaacagtatcacatggtttatgaatgtattcctcttcccaaggaagtgggtgacatggctcccatctattttaagaaagccataatggaatctgatgaagagtggtccatgaacaagaagttgatagatctctcttcaaaagatatcagaaagtctgtacccagagggttaccttacttctctgtggattttggccttcacggagggtttgcccatgtcattgaagatcagcacaaattccctcattactttggaaaggaaatcataggtgggatgctggatatagaaccaagactttggaggaaaggcatccgagaaagctttgaggatcagaggaaaaaagcactgcagtttgctcagtggtggaaaccatatgacttcaccaaaagtaaaaactgttgaggtgtaccttccattttaaaatttttcttcagatcccgttcagttttatttccattgcatctaatgaagcaactgaccctcaggtcacaggcagagagagtcacaggcagcagactgctctgggtcagtgaccaactgtacatcagggagattgtgttgtttcttcttcacctgctcctatttatggacttcattttagtcaccatggagtacaaacatatatttcgatgatcctgctccacattcccgggtctctactactttttgggatccgaattggtccagttaatttgaaagaaggccttccgtgagggtattctgaaagatatgaaatctggtccaggcacggcgtgcccggtggtacatacacccttgcatctgtctttcacctctacgtgccttctatcgcagggtcttgccgccctcttatcccgctaatcccgcttctccaacgcagccgggatacatagtgtatcaacaaacctctaactgccccctctcctcgcctatttgtatctcctgttcgcgcccann

SEQ ID NO: 13789 - DNA, 768 bp, Homo sapiens
  misc_feature 1, 757, 758, 759, 760, 761, 762, 763, 764, 765, 766, 767,768: n = A,T,C or G
natagttgtttcctgtgagaaaaaaaacgacaactaccagtggccgtcctggttccttgttataaaaaaacacactcaccaaaacacgtccctttgagtatctccggctcaccagccttggagttattggggccctggtgaaaacagatgaacaagaagtaatcaactttttattaacaacagaaattatccctttatgtttgcgaattatggaatctggaagtgaactttctaaaacagttgccacattcatcctccagaagatcttgttagatgacactggtttggcttatatatgtcagacgtatgagcgtttctcccatgttgccatgatcttgggtaagatggtcctgcagctatccaaagagccttctgcccgtctgctgaagcatgtagtgagatgttaccttcgactttcagataaccccaggttttcagatttgactttctgctggtcatcttttcaaagaaaatgaaacgtttaaaagttcatctgataatactgctaccatagttttgttttcactgctcatctcttattaaggtttttaaccataaaactgaagcaatttctgtaaagacacaaattgataacttagtatagaattaaaattcattaagttatcataagtttgatgatatccttgttaatgtactgatttttgaattattttatttgccataatccatatatttctaacatgagtattttgacagtatttaataaatcagaaagctgtttgaatggaagtaaacnnnnnnnnnnnn

SEQ ID NO: 13790 - DNA, 1031 bp, Homo sapiens
  misc_feature 1, 2, 3, 4, 1024, 1025, 1026, 1027, 1028, 1029, 1030, 1031: n = A,T,C or G
nnnnagaaacgagtaaagagaaaagggtgcgttttcgtcgcgtttgatatattgctccccactgtcctgggcaatgcaatgtgcccgccgctatttgacccagatgttgtgcaacgcgcgtttgtcctcccagttcaatttgcagttgacgaactgcagacctcgtcgtccatccctttttggctgtgttgaactccgatctggccccactagatcatgtggcccaggggacaaccatgcaggccaaagtgaactggggaagacaacacgtctacacaatcgcatacaggtatacaaaaagcaacaagagtttaattctctttttacatggccacaggctctcttcagtcaggggaacttcagctggtgcctctctcttgcagctatgaggcgacagtgtggtgacatgcctcatacagactgtcccagtaagccaggacaagtcaccattaaaatcttgcatgaacagccctgggcacgtgggaatgttaagaaagagccaccgcctccttagtcagcttaaccacagctccaaacgcagtttgtcccagctggcaaacgcctcaaacaccaatcatgcgtcgtgctcctattctgggtttttataaaacacttttatatagagatatagatagcacagtaaatgtgcttctgatgcactctaacatagaggacaggaatacacactgtggggcgccgccccagccatctccacagtggagaaagtgcgagggttaaatacacgtggcggggtggcagacggcaggaagttacagagcgccacgctccacgtccttccacgcgactgactcatccaacactcagaactcgccttctttatccccttggtgggtaggagcagtaacaaaacaatgtcagtcattttctaagggtggaggatgtcaaactgtctggtaccgagagagccaattctcatccagaaatcatctagaaataattgttgaaggtcagcctgacccatggccccaggctaagggctgatctgtaaagggcgcctcgccannnnnnnn

SEQ ID NO: 13791 - DNA, 1984 bp, Homo sapiens
  misc_feature 1, 2, 3, 4, 1983, 1984: n = A,T,C or G
nnnnccgccgcggcccccttctgcctgcccttctgcttcctctcgccttctgcagctgccgcctacgtgcagcccttcctggacaagagcggcctggagaagtatctgtacccggcggcggctgccgccccgttcccgctgctataccccggcatccccgccccggcggcagccgcggcagccgccgccgccgctgccgccgccgccgccgcgttcccctgcctgtcctcggtgttgtcgccccctcccgagaaggcgggcgccgccgccgcgaccctcctgccgcacgaggtggcgccccttggggcgccgcacccccagcacccgcacggccgcacccacctgcccttcgccgggccccgcgagccggggaacccggagagctctgctcaggaagatccctcgcagccaggaaaggaagctccctgaatccttgcgtcccgaaggacggaggttcaagcagagtgagaagttaaaatacccttaaggaggttcaagcagagtgagaagttaaaatacccttaaggtctttaagggaggaagtgtaatagatgcacgacaggcataaacaagaacaacaaaacaggtgttatgtgtacattcggagttcctgttttgctcatcccgcaccaccccaccctccacacactaacatccctttcttccccccaccagctgtaaaagatcctatgcgaaagacactggctcttttttttaatcccccaaataaattttgcccccttttaggccatgttccattatctcttaaaattggaacctaattcgagaggaagtaagaagggtctgttctgtggctgagctaggtgaaccccggggtaggggaaagatgttaacacctttgacgtctttggagttgacatggaacagcaggtagttgttatgtagagctagttctcaaagctgccctgcctgttttaggaggcgttccacaaacagattgaggctcttttagaattgaatttactcttcagtattttctaatgttcagctttctaaaaggcatatatttttcaaagaagtgaggatgcagtttctcacgttgcaacctattctgaagtggtttaaatggtatctcttagtaacttgcactcgttaaagaaacacggagctgggccatcgtcagaactaagtcagggaaggagatggatgagaaggccagaatcattcctagtacatttgctaacactttattgagaaattgaccatgaattaatggactcatcttaatttcttctaagtccatatatagatagatatctatctgtacagatttctatttatccatagataggtatctatacatacacatctcaagtgcatctattcccactctcattaatccatcatgttcctaaatttttgtaatcttactgtaaaaaaaagtgcactgaacttcaaaacaaaacaaaaaacaacaacaacaaaaaacaagtccaaactgatatatcctatattctgttaaaattcaaaagtgaacgaaagcatttaactggccagttttgattgcaaatgctgtaaagatatagaatgaagtcctgtgaggccttcctatctccaagtctatgtattttctggagaccaaaccagataccagataatcacaaagaaagcttttttaataaggcttaaaccaagaccttgtctagatattttagtttggccaaggtagcactgtgagaaatctcactggatgttatgtaaggggtgagacacaccagtctgactatgagtgaggaaaatatcggggcctccccccgcggggcatcgcgcggcgtgcaccgtggctcagagccgggttaaaacgttaaacctctcaggcaagacgggctacgccctacggcaaaccacgatcagcggcggacgcaccgggcagacctggccacgactcgcgccacccttgggcggtgcccaacgcccgggcacgcccggcaaccgcgccacacaaaaacgcgccccgtacann

SEQ ID NO: 13792 - DNA, 461 bp, Homo sapiens
  misc_feature 1, 460, 461: n = A,T,C or G
naagagcaaccgagatgaaggtgaagatgctgagccggaatccggacaattatgtccgcgaaaccaagttggacttacagagagttccaagaaactatgatcctgctttacatccttttgaggtcccacgagaatatataagagctttaaatgctaccaaactggaacgagtatttgcaaaaccattccttgcttcgctggatggtcaccgtgatggagtcaattgcttggcaaagcatccagagaagctggctactgtcctttctggggcgtgtgatggagaggttagaatttggaatctaactcagcggaattgtatccgtacctcggccgcgaccacgctaaaataaacagcaggacagaaattgtgttgttttgttctttgaaatacaaccaaattctcttaaaatgattggtaggaaatgagtacctggccgggcgaccgccaccgcggtgagcnn

SEQ ID NO: 13793 - DNA, 3581 bp, Homo sapiens
  misc_feature 1, 3568, 3579, 3580, 3581: n = A,T,C or G
nggctactgcaacctctgcctcctgagtagctggaattacaggtgcccgccaccatacccagctagtttttttgtatttttagtagagacagggtttcaccatgttggccaggctggtctcgaactcctgaccactgatccacccacctcggcctcccaaagtgctgggattacaggcatgagccaatgtgcctggccattcctgtgattttttagaatttttcacttttcatataaagttgcattttatcatgaggaaaatgttttggctgaaaaacatatgccccaaaaaaaaaaaaatcagttttcactatttttccagcttgcctagggaaacgtcctcccctgagcaaagtgggatgtgcatggctcttttttgtgattaagcaggcatcaaatgggcagttttcattttcactgacacagaaacatgtggctgaagcaggaataaaatcctgcctactgacttctgtctccattcttgctccaggtaaaatcagagaacctccccttcttggccctttaattcccccaggcagaggcggctccagctcctgttaagggccccagttttactcatgctacctgaccttagttttagtactttcaaatgtgatttgggtaaaaactattttgcaggcaaaagtgttaattttttataaatatgtataataaaaaagctataaaagtttttccttttcttgtatttttcaaatactccccaagacacaatccttgaaggtgaactaggtggcacttgattatgctaattgtgggagctactgaactatactgattaaattaaatgcttgcaggttcctgggtaattttcctttgtgaataacctggcgctacctgaatttttctctaacaaacatctccaatgagggtaaacaatgatcttgattctaatttatatgaggttaaaaaccttcagatttcgtattttgaattgttctccctagtttcctcagtggttacccccttttagtcagtaaccatctctgttcagaattcagtctttggcttttgaagaaatgggcacagagccaaaggacccatttcacagttcccttggaatatatttcccattgttggactgaggcaaacaaaaccaactgtgcaaatcacaagcaaaagagacttctgtccgtagttgcgagtgccatcagtgtgagcttaccagctacaaaaatctgtcatggactggggaacagtatgattccttattgaaactttcatcctcatcggctggcttgtcagcgttctgaagttaatatccatgctgcctgaaacaaatgttatgtttaactagcacttaacttttaaaattgcttaattctcctttcagatgcatgcactaagtcttctctgagcctgcagcaatattttagagggacctcttctaagtcagagccttgacattctactccaaaaggaagtccaaattagagcccataggctttttcttaaaagctgttaaggagtagtaagaaagttaccactctaaggaaaacatgaaactatctgaaagtcttctggttcctaactggatacagattagattattttaaatgagaaaaaagtgcaccgtagttacccgatcaagattggactgcctgtgtccctggcatgaattaaagaacctccatagttgcttgttcccttctgaaggtgtttcctatggcccacgagaattataaagcaatcactttttaagtctatcagtcaaccttaatagctctcaagagtttcgattatcaagctttaaagtgataacatatcaagatgactattaaaaaataaacatctctgaaagtgtcctttcctccataaggctttaaacaatttgcaaattcttaattgggagtatgtcccaatcattctattaaactatttacagctctacctacttctagattcagcaaacagagctactagttagagtattttgagagccaaaatagtaagagacttctgtaatggttgagatttctgcactgaccttaattagggtaccgccatagggctaccaaagtttttagtgagggctggggaggtggagcataagtaacattttttttctgcagaaggtgatggctttgtagaacactataaaatttttcaggaaaacatacagcaaattttcttatccagtgggaacagcctatttgacaaggaatgatatacaagtttgattcacctttgagcactcttatagagtttacagaagaggcgtaactggttacaaaacaaaagttacgccttcactatccagttcttaaagtttatccacatcctacaaatcttatgttcatgtaggtcaggttaaagtaagctccaaacttgtggccttcagaagcatctcctgtttaacacacctgaaattactctaacttaatacatttgtattctctaagaaataatgctgactgctgtcaccacagcatcactgatctctcagtggctgttaaaatataaacaagtggaaaaaaagtatacaagttgatagcagctgttcatgtattcttgttttgctaatacctgtgtagagaaagacagtttcacatgcagatcaccatacatttttgcttaaaggttacactgggtaaactgtttgtttatcacattacatctgggtgagattttgcatgtgaccaagaggaagaaatcattcagtcccggaaatagcaactgctatgtaaaaccacatccccttgactagtacttcatctttccacagtcattcatctgctaatcaggtgaaatatcagctcagcagaacaaagcaagttatacacaaatttcccccacattcacactgatgccgtacttagtaattctggttctaccattcccttttgcactttttgcaagtcaaattcatgtggaaaaatgttctgtttgtagaactcatagtattcacttatagtgctcatgtcaggaatggcaagtgagtaagagcccctgataatctgcttttgttagaacgtaatgcaaagataataaaacatgtccacttcttttctagttctaatcagtttttagacatcaagatttatttactttgcatgagatttgtttcctattatttgaatatgtgctatacacttgaattagaaaaacctgcttgaatgtattgtcagttattaaagcacatgtgactaagtttgcatttgtcagtattgttctactgtttgtactgaaagtctcattttaaaattgctacttaacactgtactataccttgtaattttttagattctccacttgtattctttaaatgtttccagatgcctttagttttagctgctgtaaaatagctactttgcgttatttgatatagaattgttttttaaaaactccatttatttatacagagacatttataatattttacaaacattcttatattctgaataaatatttctaattccaaaaaaaaaaaaaaaaactcgagggggggcccggtacccaattcgccctatagtgagtcgtattacaattcactggccgtcgttttacaacgtcgtgactgggaaaacccctgcgttacccaactaatcgncttgagaacannn

SEQ ID NO: 13794 - DNA, 849 bp, Homo sapiens
  misc_feature 848, 849: n = A,T,C or G
cgtccgcgctgatgacattgccctgctgaagctgtctcagagagtgaaaatgtccagccacgccaggcccatctgccttccttgcacagtgggggccaacatggctctgcggagatccccaggtagtacctgtaaagaccatgagacagaacttctgtcacagcagaaggttcctgcgcatttcgtagctctgaacgggaacagaatgaacatcaacctcaggacaggacctgagaggacaagctgtatcgaggctgtctcccaaaacaagggcagcttccccggcttgacaaacgtcagtgaggtggtgacagaccagttcctatgtagcgggatggagggagatgacagtccttgcaaaggagaatccgggggagccgttttccttgagcggaggtacaggtttttccaggtgggcctggtgagttggggtctttttgacccttgtcacggttcctccaacaaaaacttgcgcaggaagcctccgcatggcgttgtgcctagggacttccacatcagtctcttccggctgcagccctggttgaggcagcacctggatggtgtcctcgactttttgcccctttaacacggtcaccgactcctttgctggtctgtccctcctgtcttctgcctctgagtgttcttgctcccaggtacataaatcctggaacgcagagacaaaagctaggaatccccagggttgtgccagaaccactgtgccctcccgagaagcaagtgtctctctagcgtggatgacccgtgctccttttgctttcacacagaatttcccagttatgaaattaataaaaatcaatgatttccaaaaaaaaaaaaaaaagggaagcgtnn

SEQ ID NO: 13795 - DNA, 180 bp, Homo sapiens
cgggcaggtacttatgatgctctctgcatatgaatgctgctggtgttaaactactcttgttcctttctacaagaaattgaaatgtgatgtcatatagtgtcacatgcttttttgatttgtctaggccatggataactttttttttagttttattattatactttaagttttagggtacct

SEQ ID NO: 13796 - DNA, 974 bp, Homo sapiens
  misc_feature 1, 2, 3, 4: n = A,T,C or G
nnnngtgcaatgtgtttcaatcactgtgtccattttctctctggttctcattgctgtggaacgacatcagctgataatcaaccctcgagggtggagaccaaataatagacatgcttatgtaggtattgctgtgatttgggtccttgctgtggcttcttctttgcctttcctgatctaccaagtaatgactgatgagccgttccaaaatgtaacacttgatgcgtacaaagacaaatacgtgtgctttgatcaatttccatcggactctcataggttgtcttataccactctcctcttggtgctgcagtattccctggccgccctttgttttatatttatttgctacttcaaggtaagaaaactttttttctatcatttccatttttaccttctttacacagaattcctcatcaaatgagtgtttctatttaaacttttttcttccatagatatatatacgcctaaaaaggagaaacaacatgatggacaagatgagagacaataagtacaggtccagtgaaaccaaaagaatctatatcatgctgctctccattgtggtagcatttgcagtctgctggctccctcttaccatctttaacactgtgtttgattggaatcatcaggatcattgctacctgcaaccacaatctgttattcctgctctgccacctcacagcaatgatatccacttgtgtcaaccccatattttatgggttcctgaacaaaaacttccagagagacttgcagttcttcttcaaccttttgtgatttccggtctcgggatgatgattatgaaacaatagccatgtccacgatgcacacagatgtttccaaaacttctttgaagcaagcaagcccagtcgcatttaaaaaaatcaacaacaatgatgataatgaaaaaatctgaaactacttatagcctatggtcccggatgacatctgtttaaaaacaagcacaacctgcaacatacttt

SEQ ID NO: 13797 - DNA, 1833 bp, Homo sapiens
acgcggggaccctgggaaatgcttctatccctgagaggaggctcagcacagaaggaggaaggacagcagggccaacagtcacagcagccctgaccagagcattcctggagctcaagctcctctacaaagaggtggacagagaagacagcagagaccatgggacccccctcagcccctccctgcagattgcatgtcccctggaaggaggtcctgctcacagcctcacttctaaccttctggaacccacccaccactgccaagctcactattgaatccacgccgttcaatgtcgcagaggggaaggaggttcttctactcgcccacaacctgccccagaatcgtattggttacagctggtacaaaggcgaaagagtggatggcaacagtctaattgtaggatatgtaataggaactcaacaagctaccccagggcccgcatacagtggtcgagagacaatataccccaatgcatccctgctgatccagaacgtcacccagaatgacacaggattctataccctacaagtcataaagtcagatcttgtgaatgaagaagcaaccggacagttccatgtatacccggagctgcccaagccctccatctccagcaacaactccaaccccgtggaggacaaggatgctgtggccttcacctgtgaacctgaggttcagaacacaacctacctgtggtgggtaaatggtcagagcctcccggtcagtcccaggctgcagctgtccaatggcaacatgaccctcactctactcagcgtcaaaaggaacgatgcaggatcctatgaatgtgaaatacagaacccagcgagtgccaaccgcagtgacccagtcaccctgaatgtcctctatggcccagatggccccaccatttccccctcaaaggccaattaccgtccaggggaaaatctgaacctctcctgccacgcagcctctaacccacctgcacagtactcttggtttatcaatgggacgttccagcaatccacacaagagctctttatccccaacatcactgtgaataatagcggatcctatatgtgccaagcccataactcagccactggcctcaataggaccacagtcacgatgatcacagtctctggaagtgctcctgtcctctcagctgtggccaccgtcggcatcacgattggagtgctggccagggtggctctgatatagcagccctggtgtattttcgatatttcaggaagactggcagattggaccagaccctgaattcttctagctcctccaatcccattttatcccatggaaccactaaaaacaaggtctgctctgctcctgaagccctatatgctggagatggacaactcaatgaaaatttaaagggaaaaccctcaggcctgaggtgtgtgccactcagagacttcacctaactagagacaggcaaactgcaaaccatggtgagaaattgacgacttcacactatggacagcttttcccaagatgtcaaaacaagactcctcatcatgataaggctcttacccccttttaatttgtccttgcttatgcctgcctctttcgcttggcaggatgatgctgtcattagtatttcacaagaagtagcttcagagggtaacttaacagagtatcagatctatcttgtcaatcccaacgttttacataaaataagagatcctttagtgcacccagtgactgacattagcagcatctttaacacagccgtgtgttcaaatgtacagtggtccttttcagagttggcttctagactcacctgttctcactccctgttttattcaaccagcatgcaatggcaatatagattgtcctacagtgaca

SEQ ID NO: 13798 - DNA, 532 bp, Homo sapiens
  misc_feature 252, 253, 254, 255, 256, 257, 258, 259, 260, 261, 262, 263,264, 265, 266, 267, 268, 269, 270, 271, 272, 273, 274, 275,276, 277, 278, 279, 280, 281, 282, 283, 284, 285, 286, 287,288, 289, 290, 291, 292, 293, 294, 295, 296, 297, 298: n = A,T,C or G
  misc_feature 299, 300, 301, 302, 303, 304, 305, 306, 307, 308, 309, 310,311, 312, 313, 314, 315, 316, 317, 318, 319, 320, 321, 322,323, 324, 325, 326, 327, 328, 329, 330, 331, 332, 333, 334,335, 336, 337, 338, 339, 340, 341, 342, 343, 344, 345: n = A,T,C or G
  misc_feature 346, 347, 348, 349, 350, 351, 352, 353, 354, 355, 356, 357,358, 359, 360, 361, 362, 363, 364, 365, 366, 367, 368, 369,370, 371, 372, 373, 374, 375, 376, 377, 378, 379, 380, 381,382, 383, 384, 385, 386, 387, 388, 389, 390, 391, 392: n = A,T,C or G
  misc_feature 393, 394, 395, 396, 397, 398, 399, 400: n = A,T,C or G
ccacgcgtccgacggaaccatggaagccccagcgcagcttctcttcctcctgctactctggctcccagatgtcagtggagaaatcgtgatgacgcagtctccagccaccctctctgcgtcgcccggggaaagagtcaccctctcctgcaggcccagtcagagttttggcgacaccttagcctggtaccagcagagacctgggcaggctcccaggctcctcatctatggtgcaaccaccagggccactggtannnnnnnnnnnnnnnnnnnnnnnnnnnnnnnnnnnnnnnnnnnnnnnnnnnnnnnnnnnnnnnnnnnnnnnnnnnnnnnnnnnnnnnnnnnnnnnnnnnnnnnnnnnnnnnnnnnnnnnnnnnnnnnnnnnnnnnnnnnnnnnnnnnnnacgaactgtggctgcaccatctgtcttcatcttcccgccatctgatgagcagttgaaatctggaactgcctctgttgtgtgcctgctgaataacttctatcccagagaggccaaagtactcggccgccgcct

SEQ ID NO: 13799 - DNA, 819 bp, Homo sapiens
  misc_feature 1, 2, 3, 4, 5, 816, 817, 818, 819: n = A,T,C or G
nnnnnctggaaggattaatgcagactttttgtgatgtcatgtacatttttgattgtagtgattagaaccatgattaaatgaccccacacaaagcaataggaagaaaaacagagcttgccctttgacttatatttcatctgtttttggggtttctttgctttaaatgtggcatagctatcttatcaataggtttcagttatctgaaccatttccgccaaaacatcattaatacattgccagtgcatttctgaaaattttactttcatatatttaactatgtgattatcttagtgtaaatgattttttgtaaaataatttagttgttagatacatgaacagatttttgcaaagaaaacaaattgcatggcactgtatcctctcaggacattttgagataagatgtgaaaatgatactcattgtaacaaaaaagattgaaaataatttttgtagaaaatataattaatttattctactatggtgtgtatggtgtgtgtgtgtatatatatatactgaaataaccccccccccccccaattatgagtaattaactttatgacaggtaacactaataaagtgcagtggcatgttcctgaaatcccagcattttgggggattgaggtgggaaggattacttgaggccaggagtttgagactagccctggcaacatagcaagactcccatctctgcaataaattaataagtaaaaaataaacaaaatattaattatgtgaaatagttttcattatgtttgatttccaccaaaaatgtatatatggacattaattaatctaacttttaatataattgaccatgnnnn

SEQ ID NO: 13800 - DNA, 837 bp, Homo sapiens
  misc_feature 837: n = A,T,C or G
cacgcgtacgcgcgcgacccgtctgggccctgcgccgccgacgcgccaccctacctcgcgctgtcagccccgccgggctcagccgacgccgcagcatcttctgcccctgcgcccgcgccagcctcgaggaagtccccgccgaggacctgggcccccaggagcgcagggggaaagaccagagactcccctaaaccacccagatgcgcaggattgaagcggtctagccaaagctttctgtggattaaaaaaaaacacgattttttttttttttggcagaagaaaaggagaggaagaccagcggggctttgcaaggaaacggggggatgtaactcgtggatacatttttccacccatcaaacatcttgttatactttgtaaacattttctttttttaaaccccagttccagccggacgcccccagacctctgaggttcgaggaggtggtggttttcatttggggctttgcatatttggttgttaggttttgcgagagccttcttattttgccagacgtctcatgcggggtgaagtccactcggccccctcccctgagtcttcgtgtgcgcggaattcgaggagatccggttactaaggatatagaggaaaaaaataaatcgcttgcttttttttttttaattgcctgcttctccccacccccaaattaagttgcttagcaagggggaaagaggctttttccttcttccaacagcccaggcgaacgcctttcgttgtttgcccgcggaccttgcatgtaggaagccgtggctggcgagcccgacattcgggagccactgcgggggggcctatttttagcgaggctcctacgggggcagacn

SEQ ID NO: 13801 - DNA, 540 bp, Homo sapiens
  misc_feature 1, 2, 3, 4, 5, 6, 7, 8, 9, 10, 11, 12, 13, 14, 540: n = A,T,C or G
nnnnnnnnnnnnnnccgccctcggcggtctacaaatacaaaatccaaatggatgattggaagtgccctaaatgtcttataagaaaatacattatggtagatatatatactaaaatttatatttcagaagaatattaaaagaggaaaatgctagtggttttatgttatgtttctttaaacatatattatcctcaacacaatattatcaaaccaaattcagcaacatctaaaaagaattatacaccatgactaagtgagatttatccctggaataagcttagtttaacatctgaaaattcatcagtgaaatacaccatagtaagaataaaggacaaaaaccacaggatcatctcaacagaaacagagaaggcatttgacaaactccaacaccctttcatgataaaaatactcaacaaactaggaatagatgagaatttcctcaacctaataaagggcttctgtgaaaatctcaaggctaatttcgtattaatggtgaaaggctaggctgggtgtggtagttcatgcctgcattcccagcgcn

SEQ ID NO: 13802 - DNA, 566 bp, Homo sapiens
acttaggactatggagaaacaatggaagacattaattctgcttgtcttgatggtaagggtggggatgaaaatacagatcgaatttgggggagcatgttaaggttaggggaatagagatagcttatatttagaacaagttagtagagactgtatgattttccaaatagagaagggtaaaaagacattccatagaggaagaaaattacatgcaaaaccacagagaccttagtttataaagagtaactgggtatggccgggtgcggtggctcacgcctgtaatcccggcactttgagaggctgaggagggttgatcatgaggtcaggagatcgagaccatcctggctaacacggtgaaacccgtctctactaaaaatacaaaaaattagctgggtgtggtggtggatgcctgcagtcccagctacttgggaggctgaggcaggagaatggcgtgaacccgggaggcggagcttgcagtgagtcgagatcatgccaccgcactccagcctcagtgacagagcgagactccatctcaaaaaaaaaaaaaaaacccacgcgtccgcggacgc

SEQ ID NO: 13803 - DNA, 588 bp, Homo sapiens
  misc_feature 1, 2, 3, 4, 5, 6, 7, 8, 9, 10, 11, 588: n = A,T,C or G
nnnnnnnnnnnatcatggagtactgcaagaggcaagagattacatttttcttatttctactactttttgttgcctaacacgtttagctggtgggacaggttctaagtatttgctaaatattgttctcattattttgaacatgtaaaagatgactgcattcttatatatttcccttttaagtttgaaaagtgaactactttctttatataaaaattcatttgcctattgtctcagaatatcacatataactggtgcactggacataagggatacgggttcccattgtggctttgtctataaatagctacaaataaatagctataaatagttttgtctataaatcttagagtgatgagtatcagttcaacatcagtaaagtgagtggcttggagcagtctcaggtctcctccattttttctgtatgactgtttcaatattttctttttgactttcaattgttgagtttttttcactcttattctaagtaaagattcttttcttgtatatcccgatcaggaatcatagcttctcaaatgtttaccaattctagaaaattcttggccatcgggcatggtggcttatgcctgn

SEQ ID NO: 13804 - DNA, 313 bp, Homo sapiens
  misc_feature 292, 313: n = A,T,C or G
cgggcaggtacaacaactgctaatgagctaacacttaatgagtaatgaccaggcaccagacactgttctagcactttatacttactgatttctttactcttcatgataaccctatgaggaaagtgcttttttgttaagctccattttcagctgaagaagctgaggcctggagaagttacatagctttctcacggtgtctccactatgaagtagctgagctgagatctcacccaaggccctgctgggttcaggccacactcttaagtacctcggccgccaccgcggggagtcncattcgcctatagtgagtcgn

SEQ ID NO: 13805 - DNA, 1032 bp, Homo sapiens
  misc_feature 1004, 1005, 1006, 1007, 1008, 1009, 1010, 1011, 1012, 1013,1014, 1015, 1016, 1017, 1018, 1019, 1020, 1021, 1022, 1023,1024, 1025, 1026, 1027, 1028, 1029, 1030, 1031, 1032: n = A,T,C or G
cgcgtccgaagggttagaaaattacttaaaatataggcatagataagattaaaagaatccatatacaccatgaccacgaccatcactcagaccacgagcatcacgtcagaccatgagcggtcactcagaccatgagcaatcactcagaccacgagcatcactctgaccatgatcatcactctcaccataatcatgctgcttctggtaaaaataagcgaaaagctctttgcccagaccatgactcagatagttcaggtaaagatcctagaaacagccaggggaaaggagctcaccgaccagaacatgccagtggtagaaggaatgtcaaggacagtgttagtgctagtgaagtgacctcaactgtgtacaacactgtctctgaaggaactcactttctagagacaatagagactccaagacctggaaaactcttccccaaagatgtaagcagctccactccacccagtgtcacatcaaagagccgggtgagccggctggctggtaggaaaacaaatgaatctgtgagtgagccccgaaaaggctttatgtattccagaaacacaaatgaaaatcctcaggagtgtttcaatgcatcaaagctactgacatctcatggcatgggcatccaggttccgctgaatgcaacagagttcaactatctctgtccagccatcatcaaccaaattgatgctagatcttgtctgattcatacaagtgaaaagaaggtgaaatcccttccaaagagctaattcatttacaaataggctgagttggggtatataggcaattccatcaatcagtacctgcactgcgggggtaaactaaacggcccttaatgatcgggggttccacaaatccctggcattccttgtgactgccgtggcacttgaatgagagataaaactcgtccatttcattgatccacttcatttgctgatacgcggatgaaggcaattcgatgttcaacaaaaaagacagacagagcaaaaagaagaggacaacannnnnnnnnnnnnnnnnnnnnnnnnnnnn

SEQ ID NO: 13806 - DNA, 181 bp, Homo sapiens
cgggcaggtactttttgttagacttacgaaagaagtgggctgtctcacaaaggatgttaaaatcatcacaagtgacaatgacaatcctaagtaagcgaaaatttccttaactatctccagcacgagtttccgaagcatgacagaaagcggacgcgtgggtcgactcaagctagcttgacct

SEQ ID NO: 13807 - DNA, 1308 bp, Homo sapiens
  misc_feature 1308: n = A,T,C or G
cgacccacgcgtccggcggtgttctgcaaaatgggttctccggcagcggatctgcggagaggcgtcccgtgcgtgcaagtgctgcgaaccacgtgggtcccgggcgcgtttcgggtgctggcggctgcagccggagttcaaacctaagcagctggaaggaaccatggccaactgtgagcgtaccttcattgcgatcaaaccagatggggtccagcggggtcttgtgggagagattatcaagcgttttgagcagaaaggattccgccttgttggtctgaaattcatgcaagcttccgaagatcttctcaaggaacactacgttgacctgaaggaccgtccattctttgccggcctggtgaaatacatgcactcagggccggtagttgccatggtctgggaggggctgaatgtggtgaagacgggccgagtcatgctcggggagaccaaccctgcagactccaagcctgggaccatccgtggagacttctgcatacaagttggcaggaacattatacatggcagtgattctgtggagagtgcagagaaggagatcggcttgtggtttcaccctgaggaactggtagattacacgagctgtgctcagaactggatctatgaatgacaggagggcagaccacattgcttttcacatccatttcccctccttcccatgggcagaggaccaggctgtaggaaatctagttatttacaggaacttcatcataatttggagggaagctcttggagctgtgagttctccctgtacagtgttaccatccccgaccatctgattaaaatgcttcctcccagcataaaaaaaaaaaaaaaaatcaacaaaggaaaacaaaaaacaacagaacgaaaacgaggacaaacaagggaagggccgcctactctcacgagagcacatacaacagatacgaagaacccgaatttgtgtcaaaagcggtgaagaactggcgggatccccaaacgtagcagcccacttgacgtgcgacacgccaggaaaccgagtaagagctcccgaccagcagggctacgagaggagaagcacaacgaaggcttgaccgcatcgagcctcagcggcagaacacatatggcacaaacatgaaagatgagcaaaacatatcgtgcgactgatggaagataagtacgagccatggaacgaaacgaacaacggagacgaggcatcagcaaggacgtcaccatagacgtcagacacgaacacgagctagtcacacacacacccagtgatgatagaacgcatgaagtgtaagcagaagaggaagaagcgacgcacaaggcacn

SEQ ID NO: 13808 - DNA, 1156 bp, Homo sapiens
tatagggagtcgacccacgcgtccgatctcacttgaatgtatatacaaagcccaggccatgcttaaacacttgcgtgcccaccagcggccttgaagaggcaggtctgggccagatgctgggcaggaaacctcatctgcagatgggcctgtgtgcacccaacgtgatgctatgcatgtctgaccgacgatccctcgaccagaatcagattcaggagctcagtttctttttcacttgggtctctggattcctgtcataggcgaaggtatatcaggaggggaagaggcctttctagaattttctttgaacacgtttacaatttagcttacatttttcgactgtgaacgtgaataggctgctttttgctttcttgtttccagaccccacagtagagcacttttcacttatttgggggaggcttcaggggactgttctcaccttaactcagccagaaagatgccctagttgtgatcaaaggtaactcgaggtggagggtagccctggggcccctcgacatcaccgtcattgatggagcctgaaccgtgtgctcctcggcagatgctgttgttgttacttccctccaagaggctggaaaagggctcagagctgctgagcaggaaccggagggtgacccatttcaggaggtgccggtacctgcccgggcggccgcccgggcaggtacagctttataaatcagatgtgttatgagcgagccctccactggtatgccaagtatttcccttaccttgtcctcatccataccctggtctttatgctctgcagtaacttttggttcaaattccctggttccagctccaaaatagaacatttcatctccattctggggaagtgttttgactctccttggaccacacgggctttatctgaagtgtctggggaggactcagaagaaaaggacaacaggaagaacaacatgaacaggtccaacaccatccaatctggtccagaaggcagcctggtcaactctcagtctttaaagtccattcctgagaagtttgtagttgataaatccactgcaggggctctggataaaaaggaaggtgagcaggctaaggccttatttgagaaggtgaagaagttcaggctgcatgtggaagaaggtgatattctatatgccatgtatgttcgccagactgt

SEQ ID NO: 13809 - DNA, 520 bp, Homo sapiens
  misc_feature 514, 515, 516, 517, 518, 519, 520: n = A,T,C or G
acagatttttttttttaaccactcaatcccaaatggaggcctacaaagaacatcgtaataacacatggaagcaaaccctgggtttttaagagcaaattctgtcccccctcactcccccaagtgacaagatactaatgaagaaagttcttcaccatagtgtttgttttaactaaactcattggagtctagttccaaatttggtagggtcatcatctctacattccttaggatttctctccctatcaagctggcccagatacaagtacctgcccgggcggccgaggtgaaataacaaccaggaactgctttttcttttcctgctgagtacctaacctacctttaagactgggataactattggaaacaatagctaataccggatatagttatttatcgcatgatgagtaatagaaaggagcttcacagcttcacttaaaaatgggggtgccaggcccctggaagcaggggttaccgttacgaggctgtggtccggggcaagccaagtacctgcccnnnnnnn

SEQ ID NO: 13810 - DNA, 415 bp, Homo sapiens
  misc_feature 1, 2, 3: n = A,T,C or G
nnnatatcaataaaataaaatactttcttaaagaaaaaaaaaaaacctcggccgcccgggcaggtaccagcgcgtcccatacgtggagccgcccgaatacgagttcttttggggctcccgggccagccgcgaaatcaccaagatgcaaatcatggagttcctggccagggtctttaagaaagacccccaggcctggccctcccgatacagagaagctctggaggaggccagagctctgcgggaggctaatcccactgcccactaccctcgcagcagtgtctctgaggactagcaaagtctggaggcagatgaatggtttctgaccctcaccagggctgtggaagggtgggggtgggtcattatagtattcaggatttacagtgcagtattcacgtgtaacttttaagttttcagt

SEQ ID NO: 13811 - DNA, 2073 bp, Homo sapiens
  misc_feature 1, 2, 2072, 2073: n = A,T,C or G
nnggctaatcaggtgaatggtaatgcggtacagttaaaagaagaggaagaaccaatggatacttccacggggggggcgcgcgcgccatttctagtcgttttcaaagcgcctcgcgctgattctcacgggcccggctgccggcccccgctctgccctggattggtagcttatgtcgatcttgatgaaagagcaattgatgctctcagggaatttaatgaagaaggagctctgtctgtactacagcagttcaaggaaagtgacttatcacatgttcagaacaaaagtgcatttttatgtggagttatgaagacctacaggcagagagagaaacaggggagcaaggtgcaagagtccacaaagggacctgatgaagcgaagatcaaggccttgcttgagagaactggttatactctggatgtaaccacaggacagaggaagtatggtggtcctccaccagacagtgtgtactctggcgtgcaacctggaattggaacggaggtatttgtaggcaaaataccaagggatttatatgaggatgagttggtgcccctttttgagaaggccggacccatttgggatctacgtcttatgatggatccactgtccggtcagaatagagggtatgcatttatcaccttctgtggaaaggaagctgcacaggaagccgtgaaactgtgtgacagctatgaaattcgccctggtaaacaccttggagtgtgcatttctgtggcaaacaacagactttttgttggatccattccgaagaataagactaaagaaaacattttggaagaattcagtaaagtcacagagggtttggtggacgttattctctatcatcaacccgatgacaaaaagaagaatcgggggttctgcttccttgaatatgaggatcacaagtcagcagcacaagccagacgccggctgatgagtggaaaagtaaaagtgtggggaaatgtagttacagttgaatgggctgaccctgtggaagaaccagatccagaagtcatggctaaggtaaaagttttgtttgtgagaaacttggctactacggtgacagaagaaatattggaaaagtcattttctgaatttggaaaactcgaaagagtaaagaagttgaaagattatgcatttgttcattttgaagacagaggagcagctgttaaggctatggatgaaatgaatggcaaagaaatagaaggggaagaaattgaaatagtcttagccaagccaccagacaagaaaaggaaagagcgccaagctgctagacaggcctccagaagcactgcgtatgaagattattactaccaccctcctcctcgcatgccacctccaattagaggtcggggtcgtggtggggggagaggtggatatggctaccctccagattactacggctatgaagattactatgatgattactatggttatgattatcacgactatcgtggaggctatgaagatccctactacggctatgatgatggctatgcagtaagaggaagaggaggaggaaggggagggcgaggtgctccaccaccaccaagggggaggggagcaccacctccaagaggtagagctggctattcacagaggggggcacctttgggaccaccaagaggctctaggggtggcagagggggtcctgctcaacagcagagaggccgtggttcccgtggatctcggggcaatcgtgggggcaatgtaggaggcaagagaaaggcagatgggtacaaccagcctgattccaagcgtcgtcagaccaacaaccaacagaactggggttcccaacccatcgctcagcagccgcttcagcaaggtggtgactattctggtaactatggttacaataatgacaaccaggaattttatcaggatacttatgggcaacagtggaagtagacaagtaagggcttgaaaatgatactggcaagatacgattggctctagatctacattcttcaaaaaaaaaaattggcttaacttttatttaaataaaatcgaagacggttacacaaaaataacagaaaaaccaaaaagactacacagaacaaaataaaggtgctatatann

SEQ ID NO: 13812 - DNA, 382 bp, Homo sapiens
  misc_feature 375, 376, 377, 378, 379, 380, 381, 382: n = A,T,C or G
acttggcatatattaggccttcaaatgatgatggatggatagacagataaaaggcccaatgaatgattgtaaatgtgtcttctcctatgtatccatgatgatattgcctagtttttaatacaagcttaagaatcaataaaatgatagatctgaaatctgtagatgccagtctggctcagtattaatactgacagtagtttttttgttttttaagaaagcaagtatattaaaatatctctgttagaaaagattacaatttgaaaggatcattctacaatcttagaactaaaaagcaatttaaggcaaagaggtcctgcccgggcggccgcccgggcaggtactgaagcattttaaactgcatgggggggtatatannnnnnnn

SEQ ID NO: 13813 - DNA, 860 bp, Homo sapiens
  misc_feature 1, 2, 3, 4, 5, 6, 7, 8, 9, 10, 11, 12, 13, 14, 15, 16, 17,18, 19, 20: n = A,T,C or G
nnnnnnnnnnnnnnnnnnnnggccgcgcgcaatctttttcccagatggagcaattttatttccaaacatgattcagaatagatagatgctttgctacctccacactggattttcactttataaaatatatttgctattaaaatcattcataaaatctaccttccccttcgtagtgggaaataagcaaagtcaaaggttaaaaggtcatgcataaaatagatccaccaagataattatataatagtcttaaattcttcacaaatcaataaaacattaatttatacttcactatacagcacttcaaggtttttctttatatattaatgtttatatttcacagacaattttacaaaaagattatcatttttttcataaaataggaaaagaaagccacagtactaaaaaaaaaaaatcaatctgcagagtgtaaacattttttataagaatacaaactaaaagaacaatgaaactcaagtacattatcagaaacagtggttgacctcttttttcctttactcccttttcatctgagagagccttttagagatccggaatcatttgctgtctgcaattactataggctttggctcacaattctggggaaaatgccaattgaaggaaccctgcctatacattttattttctttttcttcgagacagacaacctcaaaataaggtccaaatattggttccttcaaatggtgtcaaaaagaatagtattatatgaggaggatagttatcacagaataagaactaaaatcccattttttttttttaggaaaaaaagaccttcgatgatgcaggtgtctgtgtataaggaactatgacctaccaaaaaaaccaccacaaaggagaggcca

SEQ ID NO: 13814 - DNA, 508 bp, Homo sapiens
acaggaaactactaatcttgccatcttgctttaaggtgttatggtggcacagttactgctcgcctgttaaatttcaaatgtcctgtttgatactactgtagaacactatttttaatacagaaaaagctccctataatgcacttcagagaaattaaaaatcacagagtatttattaccaatgctgcaggtccgggctgatgatgccaatgtggttcgtgaccgtgacctcgaggtggacaccaccctcaagagcctgagccagcagatcgagaacattcggagcccagagggcagccgcaagaaccccgcccgcacctgccgtgacctcaagatgtgccactctgactggaagagtggagagtaccttggctttaggttttcattcgcacggaacaccttttggcatgcttaacttcctggtaacaccttcacctgcattggttttctttttcttttttctttctttttttttttttttttgagttgttgtttgtttttagatccacag

SEQ ID NO: 13815 - DNA, 1406 bp, Homo sapiens
  misc_feature 1, 2, 3, 1390, 1391, 1392, 1393, 1394, 1395, 1396, 1397,1398, 1399, 1400, 1401, 1402, 1403, 1404, 1405, 1406: n = A,T,C or G
nnncgaattggagctcaccgcggtggcggccgaggtacatcgatgttgatcttcagtttatctccccgcgacttgtccacgtagagctcaggatgcacctccgtggtgaggtaatactgcacctgcccgggcggccgaggtacatgcctagacctgggctccggccagcgcccaacagcgtggatgtcgatgacttcatcaacacgagaatacaggaggcagacaatgaccccacggctcctccttatgactccattcaaatctacggttatgaaggcaggggctcagtggccgggtccctgagctccctagagtcggccaccacagattcagacttggactatgattatctacagaactggggacctcgttttaagaaactagcagatttgtatggttccaaagacacttttgatgacgattcttaacaataacgatacaaatttggccttaagaactgtgtctggcgttctcaagaatctagaagatgtgtaaacaggtatttttttaaatcaaggaaaggctcatttaaaacaggcaaagttttacagagaggatacatttaataaaactgcgaggacatcaaagtggtaaatactgtgaaataccttttctcacaaaaaggcaaatattgaagttgtttatcaacttcgctagaaaaaaaaaacacttggcatacaaaatatttaagtgaaggagaagtctaacgctgaactgacaatgaagggaaattgtttatgtgttatgaacatccaagtctttcttcttttttaagttgtcaaagaagcttccacaaaattagaaaggacaacagttctgagctgtaatttcgccttaaactctggacactctatatgtagtgcatttttaaacttgaaatatataatattcagccagcttaaacccatacaatgtatgtacaatacaatgtacaattatgtctcttgagcatcaatcttgttactgctgattcttgtaaatctttttgcttctactttcatcttaaactaatacgtgccagatataactgtcttgtttcagtgagagacgccctatttctatgtcatttttaatgtatctatttgtacaattttaaagttcttattttagtatacatataaatatcagtattctgacatgtaagaaaatgttacggcatcacacttatattttatgaacattgtactgttgctttaatatgagcttcaatataagaagcaatctttgaaataaaaaaagatttttttttaaaaaaaaaaaagaagaaagagaaaaaaaaaaggaaaagaaaaagagaagagacaggaaagaagaaaaaaacagagaaaaaaaacaaactagtggtgggggcacagcagagcccacgaaaagaagttttgtaagaccaagnnnnnnnnnnnnnnnnn

SEQ ID NO: 13816 - DNA, 661 bp, Homo sapiens
actagaaattgcactgtcctagaaattcctccatcccatgaagccatttccatcatgaaacctttgacacacttgaacacaagttccgctctccttaagcaccagggtatagtcatttcctctgacatatcatgtacttaagcactgcagatgctccagtaatatgcccataagttcctttccaatttcaattactgggaaaatatacatatggacaatagatggatgccacaataaaaggctggcagcctaaccctcacatgaatttttccctacctctatttagggtgacagtggagggcctctggtttgctttgagaaggacaaatacattttacaaggagtcacttcttggggtcttggctgtgcacgccccaataagcctggtgtctatgttcgtgtttcaaggtttgttacttggattgagggagtgatgagaaataattaattggacgggagacagagtgacgcactgactcacctagaggctggaacgtgggtagggatttagcatgctggaaataactggcagtaatcaaacgaagacactgtccccagctaccagctacgccaaacctcggcattttttgtgttattttctgactgctggattctgtagtaaggtgacatagctatgacatttgttaaaaataaactctgt

SEQ ID NO: 13817 - DNA, 618 bp, Homo sapiens
  misc_feature 1: n = A,T,C or G
ngcgttcactcatgtaaatataagaagtcgcactcttctggactgtagcaggcttgctgccatcagccgggttcaggcccttgtaagttagctgtacagcagaagtttgctgtctctaggattcatatagcacccacagagctccaagtaaccaaattcccccaaagacaggaggtgtggctgaggaggagtgaccatattgagtgtagctttgaacgcctccgttactctttaggaggcgaccgccccagtcaaactacccaccacgcactgtctccttcccagataaggggaacgggttagaaaatcaatttagcaagggtggtatttcaaggttgactccactagaactagcgtcccagcttcaaagtctcccacctatcctacacatgctaaaccaattttcaatacgaagttatagtaaagctccacggggtcttttcgtcttgatgcgggtaaccagcgttttcactggtaccataatttcaccgagtccaatgttgagacagtagggagatcattgcgcctttcgtgcaggtcaataattagttgacaaggaatttcgctaccttaggaccgttatcgaaaaaaaaaaaaggaagatctcgagaattccgc

SEQ ID NO: 13818 - DNA, 1078 bp, Homo sapiens
  misc_feature 1, 2, 1078: n = A,T,C or G
nnatcgacccccattcgcgagaagcccgccattgtgttggtacccgggaattcgccaagtcgccgcaagcgcggaactggggttgcggcgtctaagtgtttccggtggattcccagggactgtcggaggtgtggactctgcctgcctacctggtctgggaagatgttctaccatatctccctagagcacgaaatcctgctgcacccgcgctacttcggccccaacttgctcaacacggtgaagcagaagctcttcaccgaggtggaggggacctgcacagggaagtatggctttgtaattgctgtcaccaccattgacaatattggtgctggtgtgatccagccaggccgaggctttgtcctttatccagttaagtacaaggccattgttttccggccatttaaaggggaggtcgtggatgctgttgtcactcaggtcaacaaggttggactcttcacagaaattgggcccatgtcttgcttcatctctcgacattccatcccttcagagatggagtttgatcctaactccaacccaccatgttacaagacaatggatgaggatattgtgattcagcaggacgatgagatccgcttaaagattgtggggacccgtgtggacaagaatgacatttttgctattggctccctgatggacgattacttggggcttgtaagctgagcctggtggcctcctacccttggtcctactctaggaagtgtgattgtcacacttatcatgttgtccagaggtccagtctggctgctgttgtggaggcaaggaaggcaactcatcccagaaggcatctggtgcttcttgtagcttaactactgcctcctcatttttcagtatgtgttctaagtataaaaagtccttggttctcaaaaaaaaaaaaaaaaaaaaccgggcactaatttcggggcgcgacaaacggcctcaccccggggggcaatagccgcaccctttttgaaaagggccagggggaataaaacggcggggcacaaaaaccgggggaagcgggttggaaccccttggggacggacccacaagccgaaaaatgcgtgcccgcgggaagcgn

SEQ ID NO: 13819 - DNA, 1626 bp, Homo sapiens
  misc_feature 526, 527, 528, 529, 530, 531, 532, 533, 534, 535, 536, 537,538, 539, 540, 541, 542, 543, 544, 545, 546, 547, 548, 549,550, 551, 552, 553, 554, 555, 556, 557, 558, 559, 560, 561,562, 563, 564, 565, 566, 567, 568, 569, 570, 571, 572: n = A,T,C or G
  misc_feature 573, 574, 575, 576, 577, 578, 579, 580, 581, 582, 583, 584,585, 586, 587, 588, 589, 590: n = A,T,C or G
aatatagtaatgaaaagtggacattacaagacgttagccttgaagtgtatttaactgcaccaacaggatgtataaaaaaacatggatatacagtggaagtgcagtttgatggagacatatgcaatacaatgcattatacaaactggacacatatatatatttgtgaagaagcatcagtaactgtggtagagggacaagttgactattatggtttatattatgtcgagcggccgcccgggcaggtacgcgggggaggaactgctcagttaggacccagagggaaccatggaagccccagctcagcttctcttcctcctgctactctggctcccagataccaccggagaaattgtgttgacacagtctccagccaccctgtctttgtctccaggggaaagagccaccctctcctgcagggccagtcagagtgttagcagctacttagcctggtaccaacagaaacctggccaggctcccaggctcctcatctatggtgcatccagcagggccactggcatcccagacnnnnnnnnnnnnnnnnnnnnnnnnnnnnnnnnnnnnnnnnnnnnnnnnnnnnnnnnnnnnnnnnnctttgcaatatattactgccagcagcgtagcaactggcctccgtggacgttcggccaagggaccaaggtggaaatcaaacgaactgtggctgcaccatctgtcttcatcttcccgccatctgatgagcagttgaaatctggaactgcctctgttgtgtgcctgctgaataacttctaatttctctcggaccaatgattggtccgagagaaattagtattgactccttcataatcctctggccctacccatcattaatagagccttccattaacagcatctccccgcctaagcatgctgggtcccacctcgcgaccaccccttactctaactggacccacacagaaatttttcaagctcctagaatgttccagggtctctggcttccgaatctatcacctacagttctatctgcccagaactctctgcctccccaattcactctcaccaagctagctgtttcctgattaaaattgctttcttcatgacaaaaccctgtactccagatcccccagtctggatcaggcacccctgctgggtctcctccctaggagccttcaccttagtccctgccgttacctgagtctcatcgccctcgtggtgctctcaaatgctccctccacagtctgggaggttttcactggggactatcctggaaaaggcgtaacatgtgattctaagaggtgacagtgagcacccacatgtcatctcaaactgctgagaacagggaaggcaggtgaaggtcccgcttctattgttttgtaacaacataaaagcacagtttatttcctacataaattttattttctaaagaggccttgggtactgagatgtgagatggacttcacggagagctggctgcatcacgagccccaaagggtaagaatcaggcctgggacagagcactcacacacataccgtgtgctcacaggtaagggcaggagtgcgcagcaaagaaagcttcacatggctcccatgtaacctgacttttatctctgctttcacagaatgaggcataaaactaccagctaggcactc

SEQ ID NO: 13820 - DNA, 326 bp, Homo sapiens
gtggtcgcggccgaggtacatgatacatgaccccaggttccagtgtagaacctgagtcccccattccccaaagccatccctgcattgatatgtcttgactctcctgtctacttttgcacacacccttaatttttaattggttttcttgtaaatacagttttgtacacttttggtcaggggaccaagctggagatcaaacgaactgtggctgcaccatctgtcttcatcttcccgccatctgatgagcagttgaaatctggaactgcctctgttgtgtgcctgctgaataacttctatcccagagaggccaaagtacctgcccgggc

SEQ ID NO: 13821 - DNA, 665 bp, Homo sapiens
  misc_feature 247, 248, 249, 250, 251, 252, 253, 254, 255, 256, 257, 258,259, 260, 261, 262, 263, 264, 265, 266, 267, 268, 269, 270,271, 272, 273, 274, 275, 276, 277, 278, 279, 280, 281, 282,283, 284, 285, 286, 287, 288, 289, 290, 291, 292, 293: n = A,T,C or G
  misc_feature 294, 295, 296, 297, 298, 299, 300, 301, 302, 303, 304, 305,306, 307, 308, 309, 310, 311, 312, 313, 314, 315, 316, 317,318, 319, 320, 321, 322, 323, 324, 325, 326, 327, 328, 329,330, 331, 332, 333, 334, 335, 336, 337, 338, 339, 340: n = A,T,C or G
  misc_feature 341, 342: n = A,T,C or G
gcgtccggggaaccatggacgccccagctcagcttctcttactcctgctactctggctcccagatatcaccggagaaattgtgttgacacagtctccagccaccctgtctttgtctccaggtgaaggagccaccctctcctgcagggccagtcagagtattagcagcttcttagcctggtaccaacaaaaacctggccaggctcccaggctcctcatctatgatacatgcaacagggccactggcannnnnnnnnnnnnnnnnnnnnnnnnnnnnnnnnnnnnnnnnnnnnnnnnnnnnnnnnnnnnnnnnnnnnnnnnnnnnnnnnnnnnnnnnnnnnnnnaggcgtagcaactggcctctgtcgatcaccttctgccaagggacacgactggagatcagacgaactgtggctgcaccatctgtcttcatcttcccgccatctgatgagcagttgaaatctggaactgcctctgttgtgtgcctgctgaataacttctatcccagagaggccaaagtacagtggaaggtggataacgccctccaatcgggtaactcccaggagagtgtcacagagcaggacagcaaggacagcacctacagcctcagcagcaccctgaccgtctgagcaaagcagactacgagatacacaaagtctacgcctgc

SEQ ID NO: 13822 - DNA, 767 bp, Homo sapiens
  misc_feature 1, 2, 3, 4, 5, 765, 767: n = A,T,C or G
nnnnnccgccagtccgctggaattcagctttcgagcggctgcccgggcaggtacctggatcttccaagcacagccacttctgtgaacatccctgacctgcttcctggccgaaaatacattgtaaatgtctatcagatatctgaggatggggagcagagtttgatcctgtctacttcacaaacaacagcgcctgatgcccctcctgacccgactgtggaccaagttgatgacacctcaattgttgttcgctggagcagaccccaggctcccatcacagggtcccagctcagcctgtagtcagtccactcctagtgaagcagaggctgaggggctgccccgggttggaggccgggagggacttgggatttccaaaggaagcccaggaagggagtgcaaggaaggggagcaggacaggcataaactgtgggtcaaggggccgtggttctggctctggctccgccttcactcgctgggatccacatcagctaatttccctcccccgcaccgggtttcaatattttactctgtaaaaatgaggaggctgcagtagctagcctctaaaacggttttcaaactgcagttcgcaatcctttagtggatggggaatgaaattagcggccccaaaccagtgtttcaaaaattagaatgggccaggtgcagtggctcacggctgtaatctcagcacttgtggaggttccccccgaggctggtggatggctcgagcccccgcattcaagaacagcctgtgcaacatagtgagaccgnan

SEQ ID NO: 13823 - DNA, 684 bp, Homo sapiens
gcggtggcggccgcccgggcaggacgcgggggaggaactgctcagttaggacccagagggaaccatggaagccccagctcagcttctcttcctcctgctactctggctcccagataccaccggagaaattgtgttgacacagtctccagccaccctgtctttgtctccaggggaaagagccaccctctcctgcagggccagtcagagtgttagtagctacttagcctggtaccagcagaaacctggccaggctcccaggctcctcatgtttgatgtatccagcagggcccctggcatcccagccaggttcagtggcagtgggtctgggacacacttcactctcatcatcagcagtctagagcctgaagattttgcactttattactgtcagcagtattataactggccgatcaccttcggccaagggacacgactggagattaaacgaactgtggctgcaccatctgtcttcatcttcccgccatctgatgagcagttgaaatctggaactgcctctgttgtgtgcctgctgaataacttctatcccagagaggccaaagtacagtggaaggtggataacgccctccaatcgggtaactcccaggagagtgtcacagagcaggacagcaaggacagcacctacagccttagcagcaccctgacgctgagcaaagcagactacga

SEQ ID NO: 13824 - DNA, 193 bp, Homo sapiens
gcgaggtacaactaaaaactctggacattacattaaagcaaacataacaaaacattgaagggtggggaagaaaaagcaaggtggctagaaatgacatggtggtaagttccctgggtttcctttttgcccaatatatcccagacttgaagctgaagaaaccagtaacctagaaacgccaatgggtacctgcccg

SEQ ID NO: 13825 - DNA, 396 bp, Homo sapiens
gcggccgcccgggcaggtacttgaattggtttcaggagaggccgggccaatctccaaggcgcctaatttataaggtttctaaccgggactctggggtcccagacagattcagcggcagtgggtcaggcactgatttcacactgaaaatcagcagggtggaggctgaggatgttggggtttattactgcatgcaaaatacataccggcctcccacttttggtcaggggaccaagctggagatcaaacgaactgtggctgcaccatctgtcttcatcttcccgccatctgatgagcagttgaaatctggaactgcctctgttgtgtgcctgctgaataacttctatcccagagaggccaaagtacctcggccgccaccgcggggagctccaattcgcc

SEQ ID NO: 13826 - DNA, 882 bp, Homo sapiens
atgaggctccctgctcagctcctggggctgctcatgctctgggtcccaggatccagtggggatgttgtgatgactcagtctccactctccctgtccgtcacccttggacagccggcctccatctcctgcaagtctagtcaaagcctcctatacaggggtgaatacacctacttgaattggtttcaccagaggccaggccaatctccaaggcgcctgatttatgaggttttcaaccgggactctggggtcccagacagattcagcggcagtgggtcagacactaatttcacactgaagatcagcagggtggaggctgaggatgttgggctttattactgcatgcaaggtacacactggcctccggggtacacttttggccaggggaccaagctggagatcaaacgaactgtggctgcaccatctgtcttcatcttcccgccatctgatgagcagttgaaatctggaactgcctctgttgtgtgcctgctgaataacttctatcccagagaggccaaagtactatgggtgtagtgttactattacagttaatccgtcctttgtgtgcgctgttaaatgcagtgaggattggagcactgtccactgagtctctgtgcgacaacttagtggtgtggcaggggtttccggtgtctggctctgatcttggtcgctggatagtcgtctgtgtttcttcggtgcccaaggcgacggctttggtatgggtcgcggcggggtggttggccaagtgctgcctaataatttcaggagaggatacttcgttgctgctgcaggatcagccatggtagattatggtttctgagaacagatggggcacacaattcctagtgtgcccattaacaggtcttccaaagtacctcggccgcc

SEQ ID NO: 13827 - DNA, 2426 bp, Homo sapiens
cgtccggagcctggtagaatggtgccaaggagagcccggaccacgtggtgaacgcggtgaggctggtattccaggtgttccaggagctaaaggcgaagatggcaaggatggatcacctggagaacctggtgcaaatgggcttccaggagctgcaggagaaaggggtgcccctgggttccgaggacctgctggaccaaatggcatcccaggagaaaagggtcctcctggtagtaatggtaacccaggacccccaggtcccagcggttctccaggcaaggatgggcccccaggtcctgcgggtaacactggtgctcctggcagccctggagggtctggaccaaaaggtgatgctggccaaccaggagagaagggatcgcctggtgcccagggcccaccaggagctccaggcccacttgggattgctgggatcactggagcacggggtcttgcaggaccaccaggtatgccaggtcctaggggaagccctggcccccagggtgtcaagggtgaaagtgggaaaccaggagctaacggtctcagtggagaacgtggtccccctggaccccagggtcttcctggtctggctggtacagctggtgaacctggaagagatggaaaccctggatcagatggtcttccaggccgagatggatctcctggtggcaagggtgatcgtggtgaaaatggctctcctggtgcccctggcgctcctggtcatccaggcccacctggtcctgtcggtccagctggaaagagtggtgacagaggagaaagtggccctgctggccctgctggtgctcccggtcctgctggttcccgaggtgcttctggtcctcaaggcccacgtggtgacaaatgtgaaacaggtgaacgtggagctgctggcatcaaaggacatcgaggattccctggtaatccaggtgccccaggttctccaggccctgctggtcagcagggtgcaatcggcagtccaggacctgcaggccccagaggacctgttggacccagtggacctcctgggccttgctgtggtggtgttggagccgctgccattgctgggattggaggtgaaaaagctggcggttttgccccgtattatggagatgaaccaatggatttcaaaatcaacaccgatgagattatgacttcactcaagtctgttaatggacaaatagaaagcctcattagtcctgatggttctcgtaaaaaccccgctagaaactgcagagacctgaaattctgccatcctgaactcaagagtggagaatactgggttgaccctaaccaaggatgcaaattggatgctatcaaggtgattctgaatatggaaactggggaaacatgcataagtgccaatcctttgaatgttccacggaaacactggtggacagattctagtgctgagaagaaacacgtttggtttggagagtccatggatggtggttttcagtttagctacggcaatcctgaacttcctgaagatgtccttgatgtgcagctggcattccttcgacttctctccagccgagcttcccagaacatcacatatcactgcaaaaatagcattgcatacatggatcaggccagtggaaatgtaaagaaggccctgaagctgatggggtcaaatgaaggtgaattcaaggctgaaggaaatagcaaattcacctacacagttctggaggatggttgcacgaaacacactggggaatggagcaaaacagtctttgaatatcgaacacgcaaggctgtgagactacctattgtagatattgcaccctatgacattggtggtcctgatcaagaatttggtgtggacgttggccctgtttgctttttataaaccaaactctatctgaaatcccaacaaaaaaaatttaactccatatgtgttcctcttgttctaatcttgtcaaccagtgcaagtgaccgacaaaattccagttatttatttccaaaatgtttggaaacagtataatttgacaaagaaaaatgatacttctctttttttgctgttccaccaaatacaattcaaatgctttttgttttatttttttaccaattccaatttcaaaatgtctcaatggtgctataataaataaacttcaacactctttatgataacaacactgtgttatattcttggaatcctagcccatctgcagagcaatgactgtgctcaccagtaaaagataacctttctttctgaaatagtcaaatacgaaattagaaaagccctccctattttaactacctcaagtggtcagagaccacagatggtattctatgagtcccagaagatgaaaaaaattttatacgttgataaaacttataaatttcattgattaatctcctggaagattggtttaaaagaaagtgtatgcagaattaaagaacattttaaggcacattatttactatggattcac

SEQ ID NO: 13828 - DNA, 2343 bp, Homo sapiens
  misc_feature 365, 2313, 2330, 2338: n = A,T,C or G
ggatcttctttctccttcgcctggccgggcagggccttggcagccccctcagccgagaacgccctgcctgcactgagacagcaaggtggtggaagacatagctgtggcagaggtgcactgaggtatctgtgggagctaatcctgtccatggtggaagtatggagaatttgaatgatggtgcatgaaggaaaaccggaagcatggaggtgtgtggcggacatacatcccctgcgcaggaatccgaccgactgacaacatcgacggacaatggtgtgcgatgctggatgagaatcaacgaccccacatgttgctgtgtgctcaggatcccaccagactgcccagcccgcccaattcggtcgggtagnatttgaagagaggatagtgtcgaggcgagactgactagacacaggtaacctatcgtacttctttgcgctagccgatcgttacttatgcgctagcaaagtgcaccctggatgggcaccaaagatatgggccgagcaagctccacctggactacattcgggccttgcaaatacatccccccttgcctggactctgagctgaccgaattccccctgcgcatgcgggactggctcaagaacgtcctggtcaccctgtatgagagggatgaggacaacaaccttctgactgagaagcagaagctgcgggtgaagaagatccatgagaatgagaagcgcctggaggcaggagaccaccccgtggagctgctggcccgggacttcgagaagaactataacatgtacatcttccctgtacactggcagttcggccagctggaccagcaccccattgacgggtacctctcccacaccgagctggctccactgcgtgctcccctcatccccatggagcattgcaccacccgctttttcgagacctgtgacctggacaatgacaagtacatcgccctggatgagtgggccggctgcttcggcatcaagcagaaggatatcgacaaggatcttgtgatctaaatccactccttccacagtaccggattctgtctttaaccctccccttcgtgtttcccccaatgtttaaaatgtttggatggtttgttgttctgcctggagacaaggtgctaacatagatttaagtgaatacattaacggtgctaaaaatgaaaattctaacccaagacatgacattcttagctgtaacttaactattaaggccttttccacacgcattaatagtcccatttttctcttgccatttgtagctttgcccattgtcttattggcacatgggtggacacggatctgctgggctctgccttaaacacacattgcagcttcaacttttctctttagtgttctgtttgaaactaatacttaccgagtcagactttgtgttcatttcatttcagggccttggctgcctgtgggcttccccaggtggcctggaggtgggcaaagggaagtaacagacacacgatgttgtcaaggatggttttgggactagaggctcagtggtgggagagatccctgcagaacccaccaaccagaacgtggtttgcctgaggctgtaactgagagaaagattctggggctgtcttatgaaaatatagacattctcacataagcccagttcatcaccatttcctcctttacctttcagtgcagtttcttttcacattaggctgttggttcaaacttttgggagcacggactgtcagttctctgggaagtggtcagcgcatcctgcagggcttctcctcctctgtcttttggagaaccagggctcttctcaggggctctagggactgccaggctgtttcagccaggaaggccaaaatcaagagtgagatgtagaaagttgtaaaatagaaaaagtggagttggtgaatcggttgttctttcctcacatttggatgattgtcataaggtttttagcatgttcctccttttcttcaccctccccttttttcttctattaatcaagagaaacttcaaagttaatgggatggtcggatctcacaggctgagaactcgttcacctccaagcatttcatgaaaaagctgcttcttattaatcatacaaactctcaccatgatgtgaagagtttcacaaatctttcaaaataaaaagtaatgacttagaaactgccttcctgggtgatttgcatgtgtcttagtcttagtcaccttattatcctgacacaaaaacacataagcatacatgtctacacatgactacacaaatgcaaacctttgcaaacacattattatgcttttgcacacacacacctgtacacacacaccgggcatgtttatacacaggggagtgtangggtcctgtaaagcacntaagttancctgg

SEQ ID NO: 13829 - DNA, 1244 bp, Homo sapiens
agtcgacccacgcgtccggatctcccggaccgcctgaggtcacatgcgtggtggtggacgtgagccacgaagaccctgaggtcaagttcaactggtacgtggacggcgtggaggtgcataatgccaagacaaagccgcgggaggagcagtacaacagcacgtaccgtgtggtcagcgtcctcaccgtcctgcaccaggactggctgaatggcaaggagtacaagtgcaaggtcttcaacaaagccctcccagcccccatcgagaaaaccatctccaaagccaaagggcagccccgagaaccacaggtgtacaccctgcccccatcccgggaggagatgaccaagaaccaggtcagcctgacctgcctggtcaaaggcttctatcccagcgacatcgccgtggagtgggagagcaatgggcagccggagaacaactacaagaccacgcctcccgtgctggactccgacggctccttcttcctctatagcaagcatcctcgtgcgaccgcgagagcccggggagcgggggcttgccggccgtcgcactcatttacccggggacagggagaggctcttctgcgtgtagtggttgtgcagagcctcatgcatcacggagcatgagaagacgttcccctgctgccacctgctcctgtccacggtgagcttgctatagaggaagaaggagccgtcggagtccagcacgggaggcgtggtcttgtagttgttctccggctgcccattgctctcccactccacggcgatgtcgctgggatagaagcctttgaccaggcaggtcaggctgacctggttcttggtcatctcctcccgggatgggggcagggtgtacacctgtggttctcggggctgccctttggctttggagatggttttctcgatgggggctgggagggctttgggcagccggggaacaactacaagaccacgcctcccgtgctggactccgacggctccttcttcctctatagcaagctcaccgtggacaagagcaggtggcagcaggggaacgtcttctcatgctccgtgatgcatgaggctctgcacaaccactacacgcagaagagcctctccctgtccccgggtaaatgagtgcgacggccggcaagcccccgctccccgggtttttggggttgcaggaggatgtttggcacggtacccctgtttacatatttcccaggccctctcagcatggtaaataaaagccccccccctttccctggaaaaaaa

SEQ ID NO: 13830 - DNA, 431 bp, Homo sapiens
  misc_feature 431: n = A,T,C or G
acttttataaatagccagagattgagtcgaggctctgaagaaagtccaccatgtgaaattctttccggtgacattatccagtttggagtagacgtgacagagaatacacggaaagttacccatgggtgtattgtttccacaataaaactttttctaccagatggtatggaagcccggctccgctcagatgtcatccatgcaccattaccaagtcctgttgacaaagttgctgctaacactccaagtatgtacctgcccgggcggccgcccgggcaggtacaccaagcacctatttttataacttagcttcccatggagagataatggcttgcgtgcattttatgtatccataacatacatacaaggctcggtcttttcaatgggataacagttcacaactcttcgatttgaattgtaatgaatctggtgan

SEQ ID NO: 13831 - DNA, 542 bp, Homo sapiens
  misc_feature 1, 2, 541, 542: n = A,T,C or G
nncaattctcaaactgttcaaatgttccatcagatctgaatgccttacattaacctgacaactctgtcaccaactttacagagaaaccagaagccatcaggtgcaaattccttctttttctctctgccttacctcacacctgagcttatgattatccataatcttttttttaccccatcaggagtcacagataaaggattcattctcctatccccacaactaatacgtgcccaggatcccatttctatctattccaagttactctaccagtgagttgtcttctcatttttctgttccttcaacctctccctctccactagctggtttccctcacaggaccaacacgcatgtgcagtatttgcttccacctcttagagatttctcaactacaaggacttaggcaaggtttcccttttgactggaaggcttgtagaaacgtgacaacccgccttccctaacactcatgtcacagcggtagcggaccgtattctgggacaaatggaactcacgacattccaaagaaaggtcagccaggacgcgnn

SEQ ID NO: 13832 - DNA, 765 bp, Homo sapiens
cgcgttcctctttttatagtggtggctggcaagaaggaagcagttctccacgttctcacctaagcccagagcaaggaacaggtataataagtggaaaatcttggaataagtataattatcatccagcctcccagaagaatactcaacaacccttggccaagcatgaaccaaggaaagagtccattaaaaagaccaaacatttgagattgtcacagccttctgaagttactcattataagtcaagcaaacgagaagtacgaacatctgattcttccagccatgtttcccagtctgaagaacaagcacagattgatgctgaaatggactctactcctgttggctatcagtacggtcaaggatctgatgtcacatccaaaagctttccagattcaccaggcatgtaaactcatctgcagaaaatgtaaacgtcatgtgacagatctaacagggcaagtggtacaggagggaaccaggcgctacagactgtgtaatgagtgtcttgcagaatttggcatagacagcctccccattgacttggaagctgaacaacatcttatgtccccatcagatggagataaggattccagatggcacttgagtgaagatgagaatagatcctatgtggagattgtagaagatgggtctgctgatctggtcatccaacaggttgatgatagtgaagaagaagaagaaaaagaaattaagcccaacattaggtagctgtaatgtgaaccaacagagctggcatgtctgcaatttacattg

SEQ ID NO: 13833 - DNA, 934 bp, Homo sapiens
  misc_feature 1, 2, 3, 4, 934: n = A,T,C or G
nnnncttatacgttgtcctcgtcttgatctagatatattcggtccttctttctcgtcctccctccagtgccctcttctcccctctctagtagtcgtttgtaatccggcccctttgccataacccacatattcgagtcgagcacattctgttggcactcactccccctatcagtgtaaagaatggctggttgtccaaaacatcacagtgccgtgaccaatatggtttaacttcggcccacctaaattgattttttccaccatccagctgaaaaccatactggcaggggcgaaccgcgtacatgaaggctgatgtatcacatacgtggttctgtaggccgcactggtggacttgagtatgcattgggtttttgtatactcaggcgttctggaactatcctccatgtatacaaaggaatggcttatttctacccaaaacaggaggtaagccccatgcacagcttgcagattcccctcaggcgagagacagagttaagggtagatggcagatgacctaagtggcttttttttaggaggccactcccagggccacagctttcatgtgtttgccaccagggtagaaggttctgctgacacagggcaatgactactacagccccagctgcatggaacagaaagggcatattctgtggccaccaggctcaggctctatccctcagcagctttgggatcccatgcagctcacctattttctgtgctctagcatcatccaaatcagaatgtctcaggtaagtggtagacaacgtgactcctcccctcccgctgtgaagtgtagacggctgccacggtggcagcggccagaactgaagttcccgatttctctgtttctgcagtcttggaatcgtcctattttgctttcatagaagtttctgcatcaagaaggatagtatcactttgttcttgatttgcctgagan

SEQ ID NO: 13834 - DNA, 655 bp, Homo sapiens
  misc_feature 1, 2, 53, 96: n = A,T,C or G
nnattcaattaaaatatatccttaatacttttctccatactacttccattgtntccaggcatgggtatatttcaattccccctactggtgatggcnagagtaatagagtcaaagtttacaaagacattaattctaaatatttttttctctttttcagtttggttatttctctcttcagttgtcttgttagcagactcactctatgggctctataggttccctctggcaagctgccaggttgtaagctgtcctaaaggagaggtccatgggacaaggaactgaagaatgctttcatccaacagccaggaagctactgaggtcctcagtccaagaacctgctagcaactacataaatctgaagcagatccttccccagctcagcctccagaggagaccctaccccgaccaatgctttgattgcagcctaaagcagagaacccacttaggccatgcttggattcctgaccaacaaaaactgagataataaacgtatgttaagtcaagtttgagcagtatgttacacagcaatagataactaacacatttggagttcttaattttcactgtttggtttttcaagttttcaaatttatatttggctttttttttttaacaaatctgcagtgattttttatagtttccaattctcccgcgt

SEQ ID NO: 13835 - DNA, 318 bp, Homo sapiens
ccgggcaggtacccgggaggctcgcatgtgtgggtgcatgccgtggcaggagaaggcttccgaagagccatgcatgcgtcctctggctgctccaggtgtaaaaaatgcctgtaaaaagatgggactatgggccatatttaccacgtttatccagagagttgattctccttaataccaggaaactaggcaacagcagggaggggacaatcatgagtcctaggcaggaaaggtcctctggagagaggaaatggcacacgcgcaagcacggaggcatgaggggccagggtcctggaggacactgggccgggacccccgcgt

SEQ ID NO: 13836 - DNA, 6229 bp, Homo sapiens
  misc_feature 1, 6225, 6226, 6227, 6228, 6229: n = A,T,C or G
natgtaacacataacataaaaaatatattaatccactgttaccagtaaggagtctggtgaataacagttaagttttggggagtaaaaactgtttcaatttttgactgtgttgggggttggtgctcctaatccctgtgttgttaaagggtcgactatattgtatttttgaaaattgctagagagtggacgtaaagtgttctcactaaacaaattataactatgtgaggtagtgcatatattaagtagctagatttggtcattccacaatgtatatgtacttcaaaacatcatgttgtacatgagaaacacagttttatctgttagtcagttttaaaaataaaaaatattccaactagaaactctgttgtagtttttgaaattacaacttggaggctttgaggaactgattagaagtctcctttctgtttcaggctttcatatccaaaccatagatctttagaagtaacatctgttaattaattattaataaatagtttgagtctttattaattcatggataacttgaccattttctctctccttttgcttagataatcccagatcatggccgggcacagtagctcacgcctgtattcccagcagtttgggaggccgaggcaggcagatcacttgaactcaggagtttgagaccagcttgggcaacatggcaaaaccctgtctctattaaaaatacaaaaattagctgggcatggtagtgcatgcctgtagtcccagctacctgggaggctgaggtgggaggatcgcttgagcctgggaggttgaggcttctgtgcgcgatgattgctccagtgatcacgccattgcactccagcctgggtgacagagtgagaccctgtctccaaaaaaaaaaaaaattaagcaagtagcagttacaagaccaaaagttattttcctttttttttttctctataaaattgcccatttggaccaaatctagttataacttatttcagtgtcattaagaaagttgatgaataagtcatattactcagatgttagtagctatgcatttattaatagttttatttataagtatttagtttcactctgttgcagactattttatgctaaaattagctaaagccaaattactatttcttaaaacatattttttactttttttttttttttaaatattattaggtacttcttgcaagggatatgcattagcacatactcaagaaggggaagaaaagaagcaaacttctggtacatcaaataccagaggatcaagacgaaaacctgcaatgacaactcctacaaggaggtctacacgtaacacaagagctgaaacagccagtcagtctcagagatccccaatatcagacaattctgggtgtgatgccccaggtaacagtaatccatctttaagtgttccctcttcagctgagtcagaaaagcaaacaagacaggctccaaaacggaagtctgtaagaagaggaagaaaaccacctttactgaaaaagaaacttcggagctctgtagctgcccctgaaaaatcatcttccaatgattcagtagatgaagaaacagcagaatctgacacatcacctgtgttagaaaaagagcaccaaccagatgtagacagtagtaacatttgtactgtgcagactcatgtagaaaaccagtctgctaattgcttgaaaagttgcaatgagcaaatagaagaaagtgagaagcatactgcaaattatgatacagaggaaagagtaggatcttcatcttctgagtcttgtgctcaagatcttcctgtgctagttggtgaggaaggggaagttaaaaaactcgagaatacaggtatagaggctaatgttttgtgtttggaaagtgagatttctgaaaatattcttgaaaaaggaggtgatccattggaaaagcaagaccagatatctggactttcacaatcagaggtaaagacagatgtatgtacagttcatcttccaaatgattttcctacatgtttaacatctgaaagcaaagtgtaccaacctgtatcttgtcccctaagtgacttatctgagaatgtagagtcagtggttaatgaagaaaaaataacagagagttccctagtagaaattactgaacataaagattttacactaaaaacagaggagcttatagagagccccaagttagaatcttctgagggtgaaattatacagacagtggacagacaatctgttaagagcccagaggttcaattgcttgggcatgttgaaactgaagatgtagaaataattgcaacatgtgatacttttgggaatgaagatttcaataatattcaagactctgaaaataacttactaaaaaataatcttctgaacaccaaattggaaaaatctttagaagaaaagaatgaatcgctgaccgaacatcctagatctacagagttgcctaaaacacacattgaacagattcagaagcattttagtgaggacaacaatgaaatgatacctatggagtgtgattcattttgcagtgaccaaaatgaatctgaagttgaaccatctgtaaatgctgatcttaaacaaatgaatgaaaattctgtgacacactgttctgaaaataatatgccgtcttctgatcttgcggatgaaaaggttgaaactgtttctcaaccatctgaaagcccaaaagataccatagataaaaccaaaaagcctcgtactcgaagatctagatttcattctccatctacaacttggtcacccaacaaagacactccacaagaaaagaagcggccccagtctccatctcccagaagagaaactgggaaagaaagcaggaagtctcaatcaccatctcctaagaatgagtcagccagaggccggaaaaaatcccgttctcagtccccaaaaaaggatattgcaagagaaaggaggcaatctcagtctcggtctccaaaaagggatactactagggaaagcagaagatctgaatcactgtccccaagaagagaaacttctagagagaacaaaagatctcagccaagagtgaaagattcttccccaggagaaaaatccaggtcccagagcagagaacgagaaagtgatagagatgggcagaggagagagagagaaaggagaaccagaaagtggtctaggtccagatctcattctaggtccccctcaagatgtagaacaaaaagtaagagttcatcatttggtagaattgacagagatagttactctccccggtggaagggaagatgggcaaatgatggttggagatgtccacgaggaaatgatcggtacagaaagaatgacccagagaaacagaatgaaaatacaagaaaagaaaaaaatgacatccatctagatgctgatgatccaaattctgctgacaaacatagaaatgactgtcccaattggataacagaaaaaataaactctgggcctgatccaagaaccagaaatccagaaaagttgaaagagtctcattgggaagaaaatagaaatgaaaattcaggaaattcttggaataaaaactttggttctggttgggtatctaaccgtggtagaggcagaggcaaccgtggcagaggcacttacagaagtagttttgcctataaagatcagaatgaaaatcggtggcaaaatcgaaaacccctctcagggaattcaaacagttcagggagtgaatctttcaagtttgtggaacagcaatcctataagcgaaaaagtgaacaggagttctcatttgatacaccagcagatagatctggatggacatctgcatccagctgggccgtgagaaagactttgccagcagatgtacaaaactactactcacgacgaggcagaaattcttcaggtccacagtctggatggatgaaacaagaggaggaaacatctggacaggattctagcctaaaagaccaaacaaaccagcaagttgatggttctcagctacctataaatatgatgcaaccgcaaatgaatgtaatgcagcaacaaatgaatgcacaacaccagcctatgaatatcttcccatatccagtgggtgttcatgctcctttgatgaacatccaacgcaatccatttaacattcatcctcagctacccttgcatctccacacaggagtgcccctcatgcaggtagccactcctaccagtgtatctcagggactaccaccaccaccaccccctcccccaccatcccaacaagtcaactacattgcttcacaaccagatggaaagcaattgcagggtattcctagttcttctcatgtaagtaataacatgagtacaccagttttgcctgctccgacagcagccccaggaaatacgggaatggttcagggaccaagttctggtaatacttcgtcatcaagtcacagcaaagcctctaatgctgctgtaaaattggcagaaagcaaagtaagtgttgcagtggaagccagcgcagatagctcgaagacagacaagaaattgcaaattcaagaaaaagcagcacaagaggtaaaattggccatcaagccattttaccaaaataaagatatcaccaaggaagaatataaagaaattgtacggaaagcagtagataaagtttgtcatagtaagagtggagaagtaaattctactaaagtggcaaatctggttaaagcctatgtagacaaatacaaatattcacggaaggggagccaaaagaaaactctggaagaacctgtgtctactgaaaaaaacataggctgaaatggggaacgctgtcaaggacattatcaggatatctgcaaagtgcaatttcaacatgtaccattaactgaaaatcatacataactgtgattgaaatttggttttgataaaattatttttttaacataggatatgatgttttgttctaaataaatataggtctgcactgcaacttctgtatccttccttcccctccaccctcccccacaaaattcaagggaaagtaaagggtttaaaggaatgtgcatctttactaggactgtgttatagtgtggatactggaaaatgtatagctttttgattagggcaatggagtgcataaattagaaacttctaagtgcactggttttcaaagagatatatataatgcatttattctgtcaggttaaaatataaagtatgatctttatgattttttccctctaattatagaaagttaaataatgtattaccatgaaaaatgtttctaatattaaatagaacatatcagttgcaaagttcctaatgtgtatttttaaagcacatatctgaataaattgcctagatagaaaaaaaattatcacgagtaaaatttagtgttcaaaacattgagacactcttcacctattgtatgaccaaataaaggttatgctgcttgtttttcttttgtgcctttgtttacccctaattgagataagcagtttgacttactagattacaactttggcagttcaaagtctttgttgaagactttgaggaaaaagatttggaaaaattgttgactttcggccgggcatgatggctcacgcctgtaatcccagcactttgggaggccgaggtggcggatcacctgaggtcaggagttcgagaccagcctggccaacatggtgaaatcccgtctctactaaaaatacaaaaattagccaggcgtggtggtgggcgcctgtaatcccagctatgcgagaggctgaggcaggagaatcagttgaacccgggaggcggggattgcagtgagccgagaccatgccattgcactccagcctgggcaacaggagcaaatctccgtctcaaaaaaaagaaaaaaaaaagtgttgactttgtagaaattatgttctttcatagtatcttcttctacccgttgcagacgataaattatttgtgccaattcgagaattgctgttaggctgttatcctcccttccttggggctaagaattacaagactcatggcactggcgtaaagttgttgtttatctaatcactgatgaaatattttcacacttgaaaatccccaaatgctttacaatgaatgaagtgttaatttggtgaccaggtggtagccattagccatgttgcaaaattctagacagtaaacctgtgttttgaaacagagggaatttaaatagggcctggtagccctccgggatacgccacggatcgccccccttagcgaggcaacaccgctcacaggagcgcaaggtgggccaaactgcatccaaagaggttccccaaggcgacaatcggaacacgcnnnnn

SEQ ID NO: 13837 - DNA, 453 bp, Homo sapiens
  misc_feature 1, 2, 3, 452, 453: n = A,T,C or G
nnngagaacattctttaatcagttgtaagcatatttgggttacagaaaaacatttgagagatctaacatttgttatgtgccctctgtatatcatctacacgataagactgaaatattttattcttttacagagaagggaactcccgcgtacgcgggatatgcaaatattctcatgcaagaagttccacagtaacaacagcaaaaagaaaaaattagttgtccagccagtgctggaggaaaatgtttctggggaagatgactcagtcattttgtggcgagacaccctttggtaactcccactgaccagtcttgggagccttcctggaatgatcgtgggctgagcggagatgttttttgcaaaatgaaactgaagctgaaagaaaggagaattcgagtgaaccaagagaaatccaaagacctggggaaggaggacttaagatgaaagtgaagcnn

SEQ ID NO: 13838 - DNA, 1194 bp, Homo sapiens
  misc_feature 1194: n = A,T,C or G
tcgacccacgcgtccgtttttatttctttattatagtgtttcattgggtacccggtccttcacttggatgtgtaggttcctaatgagccatggagttatggatgtataacaatctgttctccctttacccttttaatgtatatgggcaataattttaaagtagtttggatttttttaagttttgaggggtgggaggggtctaaggcagaatatatcctttttaaaaatgtatatatacttttcattaactatattgtattatttcatgctgtacccagtccattgcttggacttacgggtacctaatgaaacgtggaggtccggatgtatgaaaatctcctcttttcccctttccttattgcctctgtaggcaataattatagagtagtatagatggtttttcttttttatccatctgcctatctccaggaggatggggtgtgcacttttagaaatgtatataaatgttcttgctcctttttcctgttacttcattgtgtgccaaggcctttccatggatacttaggtacgtaatgaaaattgaggttcattctatgaaaaaatctccccttctccccttcccttattgcctgtcttggcaatggccagtagagtagttatttaagggattgtgttgttttgtgtttttgtgtttgtttcggtaggggaggtggggaatttctgggtttgtcttttttttaatgtatataaaagtttgctagttgttgttattgttgttctttcactctcaacacagttttttgtttggagttgtaggaatcaaatgtaatgagggacccagacccgagagtgtggtaaatattctttgccttcctcagagcctgtatacacaagcaagtagtatgtgagcactacagggcttgggttttggttttttgcttttgagggttttaatgaggagtgggattgttgagaggaaaaggcaagatatataatttttttaatgtatataaatgttttgctcctttttgatgttaacttcattttgaatctggtcctttgtatgaccacttaggtacttaatagtaataaagttgagattgactctatgaaaaatatcccatactccccatccctcattgcctagggggcaatggtagaatagatgtttggtttcttttgggggtgtctgagtgtatatgtgtgtgtatatacacacaagacacacataan

SEQ ID NO: 13839 - DNA, 568 bp, Homo sapiens
  misc_feature 568: n = A,T,C or G
actgaagtcctcagcctagtgcctcccgatgcgttattttcacacaagcgatcgggttaacgccacagttccacatggctggggtggcctcacaatcatggcggaaggtgaaggaggagcagaggcaggtcttacatggtggcaggcaagagagcctgtgcagggaaattccttcccaggccacagaaatggaaaagccagacacgctgaaaatgaactcagtccttcagttctggaggctggaagtctggggtcaaggttgtggccaatcctgtgtctggcaaggctgcttcctggtttgcagacaccatcttcctccctgtccttcagcccacagcagtgcccttggtcctaccccttcctctcctagacttcctccacaggagttcggcaggcactcctggtcttcctttatcttcttgcagaaagatggcccggcaggtccgtccaaacacaaagactggacgcagagacccggagaacagcaaaacggagattttcaatgacagtcttgcaagactgggtgtctggctggcatgcagccacccccgcgtacctcggccgctcn

SEQ ID NO: 13840 - DNA, 5274 bp, Homo sapiens
  misc_feature 5119, 5187, 5269: n = A,T,C or G
actatagggagtcgacccacgcgtccgcggctaagttggaggtactggccacgactgcatgcccgcgcccgccaggtgatacctccgccggtgacccaggggctctgcgacacaaggagtctgcatgtctaagtgctagacatgctcagctttgtggatacgcggactttgttgctgcttgcagtaaccttatgcctagcaacatgccaatctttacaagaggaaactgtaagaaagggcccagccggagatagaggaccacgtggagaaaggggtccaccaggccccccaggcagagatggtgaagatggtcccacaggccctcctggtccacctggtcctcctggcccccctggtctcggtgggaactttgctgctcagtatgatggaaaaggagttggacttggccctggaccaatgggcttaatgggacctagaggcccacctggtgcagctggagccccaggccctcaaggtttccaaggacctgctggtgagcctggtgaacctggtcaaactggtcctgcaggtgctcgtggtccagctggccctcctggcaaggctggtgaagatggtcaccctggaaaacccggacgacctggtgagagaggagttgttggaccacagggtgctcgtggtttccctggaactcctggacttcctggcttcaaaggcattaggggacacaatggtctggatggattgaagggacagcccggtgctcctggtgtgaagggtgaacctggtgcccctggtgaaaatggaactccaggtcaaacaggagcccgtgggcttcctggtgagagaggacgtgttggtgcccctggcccagctggtgcccgtggcagtgatggaagtgtgggtcccgtgggtcctgctggtcccattgggtctgctggccctccaggcttcccaggtgcccctggccccaagggtgaaattggagctgttggtaacgctggtcctgctggtcccgccggtccccgtggtgaagtgggtcttccaggcctctccggccccgttggacctcctggtaatcctggagcaaacggccttactggtgccaagggtgctgctggccttcccggcgttgctggggctcccggcctccctggaccccgcggtattcctggccctgttggtgctgccggtgctactggtgccagaggacttgttggtgagcctggtccagctggctccaaaggagagagcggtaacaagggtgagcccggctctgctgggccccacaggtcctcctggtcccagtggtgaagaaggaaagagaggccctaatggggaagctggatctgccggccctccaggacctcctgggctgagaggtagtcctggttctcgtggtcttcctggagctgatggcagagctggcgtcatgggccctcctggtagtcgtggtgcaagtggccctgctggagtccgaggacctaatggagatgctggtcgccctggggagcctggtctcatgggacccagaggtcttcctggttcccctggaaatatcggccccgctggaaaagaaggtcctgtcggcctccctggcatcgacggcaggcctggcccaattggcccagctggagcaagaggagagcctggcaacattggattccctggacccaaaggccccactggtgatcctggcaaaaacggtgataaaggtcatgctggtcttgctggtgctcggggtgctccaggtcctgatggaaacaatggtgctcagggacctcctggaccacagggtgttcaaggtggaaaaggtgaacagggtccccctggtcctccaggcttccagggtctgcctggcccctcaggtcccgctggtgaagttggcaaaccaggagaaaggggtctccatggtgagtttggtctccctggtcctgctggtccaagaggggaacgcggtcccccaggtgagagtggtgctgccggtcctactggtcctattggaagccgaggtccttctggacccccagggcctgatggaaacaagggtgaacctggtgtggttggtgctgtgggcactgctggtccatctggtcctagtggactcccaggagagaggggtgctgctggcatacctggaggcaagggagaaaagggtgaacctggtctcagaggtgaaattggtaaccctggcagagatggtgctcgtggtgctcctggtgctgtaggtgcccctggtcctgctggagccacaggtgaccggggcgaagctggggctgctggtcctgctggtcctgctggtcctcggggaagccctggtgaacgtggtgaggtcggtcctgctggccccaatggatttgctggtcctgctggtgctgctggtcaacctggtgctaaaggagaaagaggagccaaagggcctaagggtgaaaacggtgttgttggtcccacaggccccgttggagctgctggcccagctggtccaaatggtccccccggtcctgctggaagtcgtggtgatggaggcccccctggtatgactggtttccctggtgctgctggacggactggtcccccaggaccctctggtatttctggccctcctggtccccctggtcctgctgggaaagaagggcttcgtggtcctcgtggtgaccaaggtccagttggccgaactggagaagtaggtgcagttggtccccctggcttcgctggtgagaagggtccctctggagaggctggtactgctggacctcctggcactccaggtcctcagggtcttcttggtgctcctggtattctgggtctccctggctcgagaggtgaacgtggtctaccaggtgttgctggtgctgtgggtgaacctggtcctcttggcattgccggccctcctggggcccgtggtcctcctggtgctgtgggtagtcctggagtcaacggtgctcctggtgaagctggtcgtgatggcaaccctgggaacgatggtcccccaggtcgcgatggtcaacccggacacaagggagagcgcggttaccctggcaatattggtcccgttggtgctgcaggtgcacctggtcctcatggccccgtgggtcctgctggcaaacatggaaaccgtggtgaaactggtccttctggtcctgttggtcctgctggtgctgttggcccaagaggtcctagtggcccacaaggcattcgtggcgataaggggagagcccggtgaaaaggggcccagaggtcttcctggcttaaagggacacaatggattgcaaggtctgcctggtatcgctggtcaccatggtgatcaaggtgctcctggctccgtgggtcctgctggtcctaggggccctgctggtccttctggccctgctggaaaagatggtcgcactggacatcctggtacagttggacctgctggcattcgaggccctcagggtcaccaaggccctgctggcccccctggtccccctggccctcctggacctccaggtgtaagcggtggtggttatgactttggttacgatggagacttctacagggctgaccagcctcgctcagcaccttctctcagacccaaggactatgaagttgatgctactctgaagtctctcaacaaccagattgagacccttcttactcctgaaggctctagaaagaacccagctcgcacatgccgtgacttgagactcagccacccagagtggagcagtggttactactggattgaccctaaccaaggatgcactatggatgctatcaaagtatactgtgatttctctactggcgaaacctgtatccgggcccaacctgaaaacatcccagccaagaactggtataggagctccaaggacaagaaacacgtctggctaggagaaactatcaatgctggcagccagtttgaatataatgtagaaggagtgacttccaaggaaatggctacccaacttgccttcatgcgcctgctggccaactatgcctctcagaacatcacctaccactgcaagaacagcattgcatacatggatgaggagactggcaacctgaaaaaggctgtcattctacagggctctaatgatgttgaacttgttgctgagggcaacagcaggttcacttacactgttcttgtagatggctgctctaaaaagacaaatgaatggggaaagacaatcattgaatacaaaacaaataagccatcacgcctgcccttccttgatattgcacctttggacatcggtggtgctgaccaggaattctttgtggacattggcccagtctgtttcaaataaatgaactcaatctaaattaaaaaagaaagaaatttgaaaaaactttctctttgccatttcttcttcttcttttttaactgaaagctgaatccttccatttcttctgcacatctacttgcttaaattgtgggcaaaagagaaaaagaaggattgatcagagcattgtgcaatacagtttcattaactccttcccccgctcccccaaaaatttgaatttttttttcaacactcttacacctgttatggaaaatgtcaacctttgtaagaaaaccaaaataaaaattgaaaaataaaaaccataaacatttgcaccacttgtggcttttgaatatcttccacagagggaagtttaaaacccaaacttccaaaggtttaaactacctcaaaacactttcccatgagtgtgatccacattgttaggtgctgacctagacagagatgaactgaggtccttgttttgttttgttcataatacaaaggtgctaattaatagtatttcagatacttgaagaatgttgatggtgctagaagaatttgagaagaaatactcctgtattgagttgtatcgtgtggtgtattttttaaaaaaatttgatttagcattcatattttccatcttattcccaattaaaagtatgcagattatttgcccaaagttgtcctcttcttcagattcagcatttgttctttgccagtctcattttcatcttcttccatggttccacagaagctttgtttcttgggcaagcagaaaaattaaattgtacctattttgtatatgtgagatgtttaaataaattgtgaaaaaaatgaaataaagcatgtttggttttccaaaaaaaaaaaaaaaaaaaaaaaaaaaaaaattagtctgnttatgctaaatctggccaaagatgagcattgtccaccactaaaatgcctctgccactttgaattctgngctacttttgtggccagaatgcggtgatcaaaacgctccatctttttacagtggcataggaagacggcaaaaatttcctaangtgca

SEQ ID NO: 13841 - DNA, 575 bp, Homo sapiens
ctccaccgcggtggcggccgaggtacttgagctgtgaggtcatcggaatcccgacacctgtcctcatctggaacaaggtaaaaaggggtcactatggagttcaaaggacagaactcctgcctggtgaccgggacaacctggccattcagacccggggtggcccagaaaagcatgaagtaactggctgggtgctggtatctcctctaagtaaggaagatgctggagaatatgagtgccatgcatccaattcccaaggacaggcttcagcatcagcaaaaattacagtggttgatgccttacatgaaataccagtgaaaaaaggtgaaggtgccgagctataaacctccagaatattattagtctgcatggttaaaagtagtcatggataactacattacctgttcttgcctaataagtttcttttaatccaatccactaacactttagttatattcactggttttacacagagaaatacaaaataaagatcacacatcaagactatctacaaaaatttattatatatttacagaagaaaagcatgcatatcattaaacaaataaaatactttttat

SEQ ID NO: 13842 - DNA, 321 bp, Homo sapiens
acagcactgggctttataaagactgcactcagaaccacactgcacagtccagttttttaaaaagctgctacatgacagacaggtaatcccactgagtgagttttgagaaacaaatcaaacgaagtaaacaagaaacataaaaaccaaatagcaaatgaataaaagcctgttcttgtaacttattcaacttttgccaaattcctaccaatcacttgctttttaaaagaaatgtataatagccaaaagagaaattatgtccctgttgtacctcggccgcccgggcaggtacacagagatgcggtccagctgcaggtcgctgtc

SEQ ID NO: 13843 - DNA, 2752 bp, Homo sapiens
ctgatgaggaactccagggatattaagggcaagattgccagagagacaagaagggtacaattagaaaacctgcatctttaatacagtgagatttgtatgcatacactctggtgtcttcattttgcagcccattatattggcttaaaagccagaaaggtgctcatgcatgtaatttatactggagcaacgaatgcagtgtatgtggacgcgtgtgtgtgcactttgaaaggcagtagttttagaagaatgagaagaaaattacttcctgggcattcattaataattcaggtgatatcctgtacctccatttataaaacaatataataataataacacgtacaaaataacatcataaataacataaatgagaagttttcaagtatttcaatgtgccttgaaaagtttcaaacagtaattctcacaattggttagacaatcttttttttttttttttttttcctctcatttagtctcagagcctaaaaagaaatgcctccagtctctgttagccccgatgtttggaatgaaattaacaagattctaccttaaaagagaaaacttatgtgggcttttcaaattgtgaaaatttgttccctcttataaaatataatctttcccctgctgctggtttataaatatgggcatatagcccagagccattataaagaaaaaacaaccaaccacaataaactaaggagcctcatctgatggctaaggttctcaggaaaaaatgagaagagcaccttgatcaggaaaggaaaaaaggatagaggataaaaacagtaacctttaacttctatgccctcactcagccagtaacttacggcaggtgttgctggcaaggccttagctgtatttcttcattaagttgaacatcctgtctgccaactccataccaacccagctgctaataagcatgccctgagcacccaggaaaagaagggaaggctggcagcttaggagctcaaaagtgccatcagagaaaaccagctcaagggagctaaggtatttgctccttagaatagtgctcaaggtggaggctgtcagtggtcaaatcaagcatgaagttccttggatgcttctccagcaagatccatggaattttacaaaaccaactttccacaggttagcatttctttcttagcctacatggcagttagttcattttgccctgttcaaatgtagtatgaaagaacagagatcaaaacacccatgtaagtacatacacatactctagttatgagcacctagggtctttcccatcactcttgcaaaagtgtgtgtgtgtgtgtgtgtatacatacactcacacatacatatgtatacacagacatctatatacagaaataatgtatatgtgtgtctaatgtatatataatatatacacatagacatacacacaagcacatatcatagctcaacctcatctaaacatctagagtctggagaacgtgctggccaacagaatacatgtgcatgtggatgtcatgtgacatgcactaaccaaccatcccgaggtaaaactgttgggaggaggaaactgccaacaatctttgaaaatccagacctaccaggccattatttagatatttgctcccatggaaccctcaaagaaacttaggaaaattggactggaatggggtcccaccctgatgaacactcaaacaccaaaagctatatctagtttatgcgtagaagtgactcacacatggcaggcagcatgaatattaggctacaatgtggataaagcactggagcttaatacagatcaatatttggcctcaggttttccagagcatagagtcttggcatttcatccctctgccttcaggtgagaattaggcacactgagggaccagggaagcacagtctgctgaactcttggctcctttctgcttttctgccccacagctggacgggttgaccaaatcaagatagaatcgagacttgaggaagcggcggtaggaatccttctccatcaggttgaaaatcttcttctgggcctcatcaaagcaggttattgtaggctctagcatgttccggcttgtctcttccctggtgcaagaatccaggttcacctctttggttgcctggactgagatgaattcattatagatctttttggccttgggacttagtttagatggtgatttgattttcttgtactcttcacagctgatccagaagtcaatattctcctcactatattcagacttcaagaaagctttgaaagctgccagcccacattcatgactaatcaggttttccagtgattcagcccatttcttgacttcctcttggctcactctctggcaaataaccactttgtccttcttgttgtgggaagaattgtgttcacaggaatcagatttttgcagcaggaaacctagccgatgtttcatatcttttgcactcctcaagcaagaagccggcagacctgcaagccctttgcacatcttatttaacagcttggaattcgcaagcaggaaagaaatgcggcaggaggagctgtggcttcggctttgagcgtactttgcctcttctccggtaaagatattgtcagaatcctctgagcgtcttcctgctaagcctgtaggggtctcttttatagcccagctacgaccgtccagccaatcagacgaccgctctgcagtaccagctcctctgtctccctctgcctctccagcccttaggagctgactcccaatgcctttcctcttttggattagaagcatcatattatcatggtacc

SEQ ID NO: 13844 - DNA, 1791 bp, Homo sapiens
ggtccggaattcccgggtcgagcccccccccccccccgacaaactttcagagacagcagagcacacaagcttctaggacaagagccaggaagaaaccaccggaaggaaccatctcactgtgtgtaaacatgacttccaagctggccgtggctctcttggcagccttcctgatttctgcagctctgtgtgaaggtgcagttttgccaaggagtgctaaagaacttagatgtcagtgcataaagacatactccaaacctttccaccccaaatttatcaaagaactgagagtgattgagagtggaccacactgcgccaacacagaaattattgtaaagctttctgatggaagagagctctgtctggaccccaaggaaaactgggtgcagagggttgtggagaagtttttgaagagggctgagaattcataaaaaaattcattctctgtggtatccaagaatcagtgaagatgccagtgaaacttcaagcaaatctacttcaacacttcatgtattgtgtgggtctgttgtagggttgccagatgcaatacaagattcctggttaaatttgaatttcagtaaacaatgaatagtttttcattgtaccatgaaatatccagaacatacttatatgtaaagtattatttatttgaatctacaaaaaacaacaaataatttttaaatataaggattttcctagatattgcacgggagaatatacaaatagcaaaattatttgttgttttttgtagattcaaataaataatttttaaatataaggattttcctagatattgcacgggagaatatacaaatagcaaaattgaggccaagggccaagagaatatccgaactttaatttcaggaattgaatgggtttgctagaatgtgatatttgaagcatcacataaaaatgatgggacaataaattttgccataaagtcaaatttagctggaaatcctggatttttttctgttaaatctggcaaccctagtctgctagccaggatccacaagtccttgttccactgtgccttggtttctcctttatttctaagtggaaaaagtattagccaccatcttacctcacagtgatgttgtgaggacatgtggaagcactttaagttttttcatcataacataaattattttcaagtgtaacttattaacctatttattatttatgtatttatttaagcatcaaatatttgtgcaagaatttggaaaaatagaagatgaatcattgattgaatagttataaagatgttatagtaaatttattttattttagatattaaatgatgttttattagataaatttcaatcagggtttttagattaaacaaacaaacaattgggtacccagttaaattttcatttcagatatacaacaaataattttttagtataagtacattattgtttatctgaaattttaattgaactaacaatcctagtttgatactcccagtcttgtcattgccagctgtgttggtagtgctgtgttgaattacggaataatgagttagaactattaaaacagccaaaactccacagtcaatattagtaatttcttgctggttgaaacttgtttattatgtacaaatagattcttataatattatttaaatgactgcatttttaaatacaaggctttatatttttaactttaagatgtttttatgtgctctccaaattttttttactgtttctgattgtatggaaatataaaagtaaatatgaaacatttaaaatataatttgttgtcaaagtaaaaaaaaaaaaaaaaaaaagt

SEQ ID NO: 13845 - DNA, 1798 bp, Homo sapiens
  misc_feature 1787, 1788, 1789, 1790, 1791, 1792, 1793, 1794, 1795, 1796,1797, 1798: n = A,T,C or G
agggagtcgacccacgcgtccgtgcagaggctgcagcggcggcggcggcggcagtagcggcagcggcgacgacggcggcggcagcgctccaactggctcctcgctccgggctccgccgtcgagccgggagagagcctccgccagcggccaggcaccagccagacgacgccagcgaccccggcctctcggcggcaccgcgctaactcaggggctgcataggcacccagagccgaactccaagatgggaggcaagctcagcaagaagaagaagggctacaatgtgaacgacgagaaagccaaggagaaagacaagaaggccgagggcgcggcgacggaagaggaggggaccccgaaggagagtgagccccaggcggccgcagagcccgccgaggccaaggagggcaaggagaagcccgaccaggacgccgagggcaaggccgaggagaaggagggcgagaaggacgcggcggctgccaaggaggaggccccgaaggcggagcccgagaagacggagggcgcggcagaggccaaggctgagcccccgaaggcgcccgagcaggagcaggcggcccccggccccgctgcgggcggcgaggcccccaaagctgctgaggccgccgcggccccggccgagagcgcggcccctgccgccggggaggagcccagcaaggaggaaggggaacccaaaaagactgaggcgcccgcagctcctgccgcccaggagaccaaaagtgacggggccccagcttcagactcaaaacccggcagctcggaggctgccccctcttccaaggagacccccgcagccacggaagcgcctagttccacacccaaggcccagggccccgcagcctctgcagaagagcccaagccggtggaggccccggcagctaattccgaccaaaccgtaaccgtgaaagagtgacaaggacagcctataggaaaaacaataccacttaaaacaatctcctctctctctctctctctctctctatctctctctctatctcctctctctctctcctctcctatctctcctctctctctctcctatactaacttgtttcaaattggaagtaatgatatgtattgcccaaggaaaaatacaggatgttgtcccatcaagggagggagggggtgggagaatccaaatagtatttttgtggggaaatatctaatataccttcagtcaactttaccaagaagtcctggatttccaagatccgcgtctgaaagtgcagtacatcgtttgtacctgaaactgccgccacatgcactcctccaccgctgagagttgaatagcttttcttctgcaatgggagttgggagtgatgcgtttgattctgcccacagggcctgtgccaaggcaatcagatctttatgagagcagtattttctgtgttttctttttaatttacagcctttcttattttgatatttttttaatgttgtggatgaatgccagctttcagacagagcccacttagcttgtccacatggatctcaatgccaatcctccattcttcctctccagatatttttgggagtgacaaacattctctcatcctacttagcctacctagatttctcatgacgagttaatgcatgtccgtggttgggtgcacctgtagttctgtttattggtcagtggaaatgaaaaaaaaaaaaaaaaaaacgggcactcatacggtgcgaacaccaggtacacaaggacatgcacaccgctgcacgaaccctttttgccaacgggtaaccacggcccacaggaaaccacaaatcgaaaccgnnnnnnnnnnnn

SEQ ID NO: 13846 - DNA, 1459 bp, Homo sapiens
  misc_feature 1454, 1455, 1456, 1457, 1458, 1459: n = A,T,C or G
ccgcttagctcttacatttaagtaagtctttgatccgttttatttttgtaaatggtgtgacgttggggggtccaccttcattcttttgcatgtagatatacaggcttggcttctgatatccatttactctcttgattgattggcagaaatttcagcagatttcaaggagccgccatccctgccagggaaggagaagccatccccgaagacagtctgtgggtcccccctggcagcacagccatcaccttctgctgagctcccccaggctgccccacctcctccaggctcaccctccctccctggacgcctggaggacttcctggagagcagcacggggctgcccctgctgaccagtgggcatgacgggccagagcccctttccctcattgacgacctccatagccagatgctgagcagcactgccatcctggaccaccccccgtcacccatggacacctcggaattgcactttgttcctgagcccagcagcaccatgggcctggacctggctgatggccacctggacagcatggactggctggagctgtcgtcaggtggtcccgtgctgagcctagcccccctcagcaccacagcccccagcctcttctccacagacttcctcgatggccatgatttgcagctgcactgggattcctgcttgtagctctctggctcaagacggggtggggaaggggctgggagccagggtactccaatgcgtggctctcctgcgtgattcggcctctccacatggttgtgagtcttgacaatcacagcccctgctttttcccttccctgggaggctagaacagagaagcccttactcctggttcagtgccacgcagggcagaggagagcagctgtcaagaagcagccctggctctcacgctggggttttggacacacggtcagggtcagggccatttcagcttgacctccttttttgaggtcagggggcactgtctgtctggctacaatttggctaaggtaggtgaagcctggccaggcgggaggcttctcttctgacccagggctgagacaggttaaggggtgaatctccttcctttctctccctgctttgctgtgaagggagaaattagcctgggcctctaccccctattccctgtgtctgccaaccccaggatcccagggctccctgccattttagtgtcttggtgtagtgtaaccatttagtggttggtggcaacaattttatgtacaggtgtatatacctctatattatatatcgacatacatatatatttttgggggggggcggacaggagatgggtgcaatcctcccatctatcttccgaaggccggatcaggttcccttactgtgtgccacatctggtgcccctggctgcagaccaggcgccatcgtgggttgctcttgtccgcaagcattccacgcggatagcgcgaaagcgcaggagaactgaccgtgaaaatannnnnn

SEQ ID NO: 13847 - DNA, 448 bp, Homo sapiens
  misc_feature 1, 2, 3, 4, 5, 6, 7, 8, 9, 10: n = A,T,C or G
nnnnnnnnnncaggtacgcatttaaaataaaccatataattttaccagtaagaaagccgatagttaagttcaattcaaattggagttcataagttagtaatttaaatccttagacaaagttacagaaagtgcatcttcttattttccatcttcatacaatgttaattttttttttggtgtttataccttttaaaaaataaaaacagccaaatacttaagcaatatgtacctcggccgaggtacgccaagggcgccctggagacggaggatcctgcgttaatctatgactatgccattgtgctattcaagggtcaaggagtaaaaaagaacagacggcttgccttagagctgatgaagaaagcagcttccaagggattgcatcaggcagtcaatggcctgggatggtattaccacaaattcaagaaaaattacgccaaagcagcaaagt

SEQ ID NO: 13848 - DNA, 513 bp, Homo sapiens
  misc_feature 1, 75, 76, 86, 87, 91, 93, 103, 108, 109, 113, 118: n = A,T,C or G
naccaggctgcaaggtcacagagggcagacccgaaaagtcctaggaagttgtccatgcatttccctcatcagctnncgagggcttnncccncntttttatgcntgcanncccncctgnccgggcaaggtaccctccacctagcttagaaagtaaaatattagacaaacagttgaagttccctgtgtatctctctctcattctgttcttttgttttcttccccagaggtaatcagtattctggatttggtatttctccttaaaaattattgttggctgggggcggtggctcacacctggaatcccagcaccttgggaggccaagatgtggttggatcacttgagctcaggaactcaagattagcctgggcaacatggtgaaaccctgtctctacaaaaaatacaaaaattagccaggcatggtggtgcatgcctgtaatcccagctactcgggaggctgagtcaggagaatcacttgaacctgggaggcggaggttgcagtgagctgagattgt

SEQ ID NO: 13849 - DNA, 906 bp, Homo sapiens
  misc_feature 1, 2, 3, 4: n = A,T,C or G
nnnnctctaggttggttcctttgaggaaacttcttttgaccttaaaaagtggggtgagcacgtgtgtaccaaatgaggccctggactgtctcccttaaatagtaattttatgtaagtgaattaccgtcaaataagaattctttaaaaaaaaacttcagtgatatccaaccataaaaaatatgagttacatagctcgtatataatcactttacttattactgcactatgaggggcacccagatatgtaagacagagtcccaacctttggttgttggaggactatctaaggatacagagattaataaaaataaaagaactaccacgaaagaagtgccctccaagtacaaagagagttcaaatatgtacatctggttgcggagaaaggaaaaacttctcaaagaagaatttgaagtgagctttaagggttgaatggaatttttactgttagaggtagagaaatacaatatcataaagaaagatgtgatccctacaagaggattacgtggtaagttgaaagacattaaacagtccaacctggtcattgtcaaaactatatacgttgggcacagaactgaagaccaggtgtcaaaggaggatggctctgtcccctttgtgtccccagtgcctaaagcagtgtttggtgcatgcttggtgattggtaaatgtcaaagaaaaagataaaagataaaatatagccgggcgcggtggctcaagcctgtaatcccagcactttgggaggccgaggcgggtggatcacgaggtcaggagatcgacaccatcctggctaacacggtgaaaccccgtctctactaaaaatacaaaaattagccgggcgtggtgcgggcgcctgtagtcccagctactcgggaggctgaggcaggagaatggcatgaacccggcccacgc

SEQ ID NO: 13850 - DNA, 2366 bp, Homo sapiens
  misc_feature 2363: n = A,T,C or G
atagggagtcgacccacgcgtccgcggacgcgtgggcagctgccggatccttcagcgtctgcatctcggcgtccgccccgcgtaccgtcgcccggctctccgccgctctcccgggggttcggggcacttgggtcccacagtctggccggaggtttcttctcttttgcagtcctgcttcaccttcccctgacctgagtagtcgccatggcacaggttctcagaggcactgtgactgacttccctggatttgatgagcgggctgatgcagaaactcttcggaaggctatgaaaggcttgggcacagatgaggagagcatcctgactctgttgacatcccgaagtaatgctcagcgccaggaaatctctgcagcttttaagactctgtttggcagggtaagaccacacttcatcccaagagagaatgggagaacagctatcagttataagactagttgggaatatactgatattcttttgatcttctggatgacctgaaatcagaactaactggaaaatttgaaaaattaattgtggctctgatgaaaccctctcggctttatgatgcttatgaactgaaacatgccttgaagggagctggaacaaatgaaaaagtactgacagaaattattgcttcaaggacacctgaagaactgagagccatcaaacaagtttatgaagaagaatatggctcaagcctggaagatgacgtggtgggggacacttcagggtactaccagcggatgttggtggttctccttcaggctaacagagaccctgatgctggaattgatgaagctcaagttgaacaagatgctcaggctttatttcaggctggagaacttaaatgggggacagatgaagaaaagtttatcaccatctttggaacacgaagtgtgtctcatttgagaaaggtgtttgacaagtacatgactatatcaggatttcaaattgaggaaaccattgaccgcgagacttctggcaatttagagcaactactccttgctgttgtgaaatctattcgaagtatacctgcctaccttgcagagaccctctattatgctatgaagggagctgggacagatgatcataccctcatcagagtcatggtttccaggagtgagattgatctgtttaacatcaggaaggagtttaggaagaattttgccacctctctttattccatgattaagggagatacatctggggactataagaaagctcttctgctgctctgtggagaagatgactaacgtgtcacggggaagagctccctgctgtgtgcctgcaccaccccactgccttccttcagcacctttagctgcatttgtatgccagtgcttaacacattgccttattcatactagcatgctcatgaccaacacatacacgtcatagaagaaaatagtggtgcttctttctgatctctagtggagatctctttgactgctgtagtactaaagtgtacttaatgttactaagtttaatgcctggccattttccatttatatatattttttaagaggctagagtgcttttagcctttttttaaaaactccatttatattacatttgtaaccatgatactttaatcagaagcttagccttgaaattgtgaactcttggaaatgttattagtgaagttcgcaactaaactaaacctgtaaaattatgatgattgtattcaaaagattaatgaaaaataaacatttctgtccccctgaaaaaaaaaaaaaaaaaaaaaaaaaaaaaaaaaaaaaaaaaaaaaaaaaaaaaaaaaaaaaaaaaaaaaaaaaaaaaaaagaaaaagaaaaaaaaaaaaaaaaaaaaaaaagaaaacacatgacaaatcaaacaacagaacaaagagacggagaaaggcgaggggcggccgccgcctccctcatgtcctctttcacgcggcggcggcgacccgaactatctcgcctctcctttattttttttgtgtgggtaggcgctcctctgttctgtttatcatttttctaccgacggcggcgcgtctcactttcttaaacatacaacaacaaggtgtggacccaaaaaaagccaacagcgcactactacacattagtatctccagacgcacaaccactacacctacatgacggagcagggcgagaaaaacagaagcggagccgagcaccacaaacaccacgcacacaccatgcacgaagcagccgcaacgcagacaacaaacaaaaccaacgcgcggcctgcatgagaccgcacagccgacgataaaacacacgacacaagacacagcagcgaagccaacagagtcacacacccgcaaaggcatgaacgaaaaacacaacacccgacacgcgagagaacagaacacaagngaa

SEQ ID NO: 13851 - DNA, 6302 bp, Homo sapiens
  misc_feature 1, 2, 3, 4, 5, 6, 7, 8, 9, 6300, 6301, 6302: n = A,T,C or G
nnnnnnnnnagtccgggcgaacgcggccgggcccttggggaccgagtctcggcgccgccggggaacgggcgcgggccgcgccacagccggagcggggcagggccccgccaccgccttcttccgccggccccgccgccggccatgcattcttccggctcctctgactcccaaagccccggctggggcccggccagcccgagaaagacaggacggagtccagtgtgagaatggctataactttggaagaagctccgtggctgggctggctcttggtgaaagcactgatgaggtttgccttcatggtcgtcaacaacctggttgctattccatcctacatctgctatgtaattatacttcagccccttcgagtgctggacagtaagcggttctggtatatcgaaggaatcatgtataaatggcttttaggaatggtagcttcctggggatggtatgctggatatacagtgatggaatggggagaagatattaaagcagtttcaaaagatgaagcagtgatgttggtgaatcatcaggcaacaggagatgtgtgcacactgatgatgtgcctccaggacaaaggactggttgttgctcagatgatgtggttgatggatcatatttttaagtacacaaactttggaattgtttctctagttcatggagacttctttataagacagggaagatcttatcgtgaccaacagctgctgcttctcaagaagcacttagaaaataattacaggagcagagatcgaaaatggattgttttgtttccagaagggggcttcctcaggaagaggcgagaaacaagtcaggcatttgccaagaaaaataacttgccatttcttacaaatgttactctgccaaggtctggggcaacaaaaattattttgaatgcacttgtagcacaacagaaaaatggaagtccagcaggaggagatgctaaagaattagacagcaaatcaaaaggcctccagtggataatagatacaacgatagcttatcccaaagctgaacctatagatattcaaacctggatccttggatacaggaaaccaacagtcacacatgtacattacaggatctttccaattaaagatgtacccctggagactgatgaccttaccacttggctctatcagcggtttgttgaaaaagaagacctcttatcacatttttatgaaacaggagcttttccaccttccaagggccataaggaagctgtttccagggagatgaccctcagcaacttgtggatatttctcatacagtcttttgcatttttgtcaggctatatgtggtacaacatcattcagtatttttaccattgcctgttttaggaattgacgtggacttgtcaaggtcaccgtaggagttcagactttctttcataagtgtgcattattttacatgtgcaaatcagaatatatttaaaaaaaagcaaaagaaattcaatggatggattaatatttatccccctttgggatattttaaaatctactaaaatgaggattagtaatataatgacctgctaatatattttaagaacatgttttaaaaagatacactctatcacatatttaagcaaacatcacatttggagaagaggaaatcataaaatcatcctagaagactatctgagagaaattctgttgccaccagttatacttgacaatttagttgaagctcagaaagttatattcatccctcttagctgtagtctatattagggcagttctctagaacgcccacatttccaccaactcagtaaacttgaggggagctggttggcacctcgtgaagaactctttccctgtcgtttgcagtaacaaactccagtctgttgcagtaacaaactccagtctgttgcagtaacaaactctagaatattgacattctctgtgggggaaaagcagtgtccactggaccccttctggtactggatgtgttctttacaaaggctagctcagtccaacattgtgtttacatacactcgtgcttttccttatctgacttctcattttgtatcagaggcatatcataaattgataattttgcaaaatgcacttttttgagatgcagatatagcaaaggattagtaatatagcctgaaaacaaatgggagcatagcagtgtgtgaggttctcgagaactgtcttgtctctgtgtgtttatttgcctgccagtgctctccagcgccatcctgccctggacaccaccctgacgtgatgcctctattgcagctcagaggctttattttttccattttgacattggcactaaatgcatttggggatggttaaaacaaattactatagaacatttaaatgatcagtttaaggggaaataggctagtttatagaaaaataagagctagtggcttataatggtgacaggttctcatgtggcacccctaggacctgtgcagacagtagtctgttgaatcattacatcaaggagctgcccctgtcagggtgagtgtaattaggaacgataccagcacataaggctccccccaatctcttccagttgctttttcttttttctttttttttttagacaggtcttactctgtcacccaggctgtagtgcagtggcataatctcagctcactgcagtctctgcctcccgggttcgagcgattctcctgcctcagcctcccgagtagctgggactacaggcacccaccatcatgcttggctaatttttgtatttttagtagagatggggtttcaccatgttggccaggctggcctcgaactcctgacctcaggtgatctgcccacctcggcttcctaaagtgctgggattgcaggcgtgagccaccacgcccggcctccagttgcttttgaagagggtaaagtcaagtttctatttctagaaaacattttttagaaatttgttgcgatgtttgtacaatttacctcataagagaaccacacccttctccaaaagtgctggtactgcatcagtgagatgagtagggtttttgtttgggattgtaagactattaagatcctagtaagtcagtggtagtttactgtgatgtgagcattgtagattcccccgttgtcactaatcacacaacaattttgagaagtaggctataaaacaaaaaaaggttgctgttttctatttttaaataaaccaaaaaaaaacagaaaagatgtgaattttccccagttatgtgggaaaggtaaagcaacaccaaataaaagcccacagcagcttcatctttacgataactcagtgcatatgtgaaagagaatgatgcattaactgaaatacctcattgaatattatactactactggtaaaatgcagaagacagtgttaatgtgtttggtttgggtactggttgttataaaatgcaatttttttttaaatctaagcatttcattatgtgttctacagtgtcggtgaataaatgaaaccaatctcaatttagaggtatggatgatgacagaaagcccaatagaagcttaatgatgcttctgtttgaggcccagcaagcaccactaaattactggatgaaatgaaattgttcacttgagggattagtcaaccatctgggggagaagttgctcactgtcaaatacagcatgcacggtcctagctgatagaccttttcctcattgctacagcaagccacagggtagagtgaccagttctcctatccaaaaataaatgcgaacatgcatacataaatgtggctgagggccacttttgccatcactgtgctccaaaggaacatgatattgttaaatatactgtacacattaaactattctataagatgctttacttttcaagtacggtgtcattttcacagtctccagggtgacaaatgccaatagatatgtgagttaatttttttaaatatctccgtgagttgtaaatagatgtgtatttgatctgccctatccttctttgattctttaacatgttctctctcttttgtttgcaaaatatgtttgaaagcattggtagtgctttccttatcagtaactggagttctcctgcttgcactagagaaggtaaagagagaatcagtattcttatatggcaatctggggaagcagcaatatgccactgtacaaaactgaagaaaagttcctaatttgtactttgtgaagggagatgaaaggacgtttaaagtatatatattttgtcaagaggaaagaagataaaactatgccagttttatatcaatagcttgtagaagctcagctcttcttggtcttggctagactgcctagattcccacagcagacaaggttgagaatccattgctggaatcttggtattgatgagttacagtgatggaacatgtgcttggccacaggcaggtccagtcactgcaaaagtgaccaagccagcaggtcacccttaacttcagaaacaattattggtggtgaactgtacttaaattgcagagaaacctgtaagtaatggaaggtaaagaaaaattacagaatggaaaataatattttgggcaagcaaacaaattcactgagaattccaaaagtatattaaaaaagaagatagctatgagttcagatctatcttattggtctttaatattacaaccaatccttaactttccactataaaggaaggattactagattgattactttctggatagataatctggtaataaatgataggtaaatcaaaaattacttttatttaggagtttgaattcttactctcatcagacattttttttctagggacgcttactaattaaatgatttaagttgtttcttaggggttttttgcctatatatttatgactgtgttaatgagtagtgaaatgatgcggaaagacagctatcaggaagaggaaatacagaagcctgaataatctatgggttagaaaagcatccctgaataatcaaaaattggcagtattggcattgttctcaagcctttttatgaaaatgaaatctgaaatcaccaaatgtaaacctgggaacattattctagtgttgctgtcttggattcatgttaagaagcgtcttcattctttgctcatgttgcccacttcttgtggatttgtctgagtgttttttgacaatcacttccttaaagactcttctgaactagttggacctggttaatcatagagagtagcctttaatcatggatagtcttcttggattatttttatatttgaaaagaaaatgttttatttgcactactgagtaggaagagttaattgttttctttgttctttttttgaagtcattacacaggacttcactccagagttaccattatgagtgtgttcagctctggtccacagaggatggataaaaatggtttgttatgtttttttgctctgcagtgctatgagccttatatctgttaatatgaaggacaaagtcaaaagcagcagtggatagcaggaagggtagagactaatatgtttgggaccaaaaccatctaagttagagatttccagatcacagaggggctgggcattctctggagcagtcattggttggtgctttattgtaatcattttgcgccaatccccaacaattaggaactggaccctgggaataagctgagggtgctgaactgttggggaagggtgactgtagccacatggaagataaaatatgggtttttctgcaaaatttccatctgagggtttttacatttaatatttttttaagacagtttaaagagcaaacgttttttaagtgtattctagttgcaaagtatgcacacatatcttgaatggctttatttttattgtgtaaaactgttgaacacatgactgtgatgcacaaattctttacgtgtaaggagtctatgcattttacagtaacttattttatgatcgggtgatgagacagttatactttcaactgccattatttttattaagtgctttcattttctttacagttattataaaattgtatttattttatacagatgggttttcattttcctgatgctgtaatgtttacttcagcttgttgacctttctttgtgttatctgcatgttgtaacgtgtgataagaatgaatgtaaaggctgtggcaactgtaattaatttttgtaaagggctggtcacacgtggatctggtttatgaatgcatttgggatgattttggtaaccagatcaccttttcagaaatttagatgtgaacaccaaaagaagcattttctcaacaaaaattaatagctggttctattttttttaaacctagaaaaaataaagttgatttttttcaattaaagtgcttttaattcttagcagtggggatggggcatgtgtgnnn

SEQ ID NO: 13852 - DNA, 3466 bp, Homo sapiens
  misc_feature 177, 178, 179, 180, 181, 182, 183, 184, 185, 186, 187, 188,189, 190, 191, 192, 193, 194, 195, 196, 197, 198, 199, 200,201, 202, 203, 204, 205, 206, 207, 208, 209, 210, 211, 212: n = A,T,C or G
tagggagtcgacccacgcgtccggtcagatcaggtgatttgtaaaattgtatttatctgtacatgtatgggcttttaattcccaccaagaaagagagaaattatctttttagttaaaaccaaatttcacttttcaaaatatcttccaacttatttattggttgtcactcaattgccnnnnnnnnnnnnnnnnnnnnnnnnnnnnnnnnnnnncgcgcgagcacacatgtgtgtacacgcacgcatgtgtgtgtatgtgtattatcagacataggtttataacttttagatccaagaggagcaacatctatgccaaatactgtgcattctacaatggtgctaatctcatacctaaatgatactccatttaattgaaaaaagagttttaaataattatctatgtgcctgtatttcccttttgagtgctgcacaacatgttaacatattagtgtaaaagcagatgaaacaaccacgtgttctaaagtctacggattgtgctataatccctatttagttcaaaattaaccagaattcttccatgtgaaatggaccaaactcatattattgttatgtaaatacagagttttaatgcagtatgacatcccacaggggaaaagaatgtctgtagtgggtgactgttatcaaatattttatagaatacaatgaacggtgaacagactggtaacttgtttgagttcccatgacagatttgagacttgtcaatagcaaatcatttttgtatttaaatttttttacttttaaagatatttaatgatgtttttcaaatcagtacaaaaatttaaatacaaaaatgatttgctattgacaagtctcaaatctgtcatgggaactcaaacaagttaccagtctgttcaccgttcattgtattctataaaatatttgataacagtcacccactacagacattcttttcccctgtgggatgtcatactgcattaaaactctgtatttacataacaataatatgagtttggtccatttcacatggaagaattctggttaattttgaactaaatagggattatagcacaatccctagactttagaacacgtggttgtttcatctgcttttacactaatatgttaacatgttgtgcagcactcaaaagggaaatacaggcacatagataattatttaaaactcttttttaaattaaatggagtatcatttaggtctgagattagcaccattgtagaatgcacagtatttggcatagatgttgctcctcttctatctaaaagttagaaacctatgtctgataatacacatacacacacatgcgcacgcatacacacacgtgcgctcacgcgcacacacacacacacacacatatatatatatatataggcaattgagtgacaaccaataaataagttggaagatattttgaaaagtgaaatttggttttaactaaaaagataatttctctctttcttggtgggaattaaaagcccatacatgtacagataaatacaattttacaaatcacctgatctgacttgcttttaaaccatttcaatgtggctgtttagcagaaggagcccaatggatccatgctgcccaccatagtcatcagcccaaaaccagtatcctcaagaacaacccaaagtatatttggccacatagatgctgtctgctttgaaaacaaaggttgtggaggacatctttttgttgggaaaagattgttgtataattagtagtgacaagaacccctgtggtaatggactaatttctcttcttaaaaattgagaagaaatggtgcttgtatactatatagggaaatgagatattggccaagagaagaatttttgtgatggtaataatgattcagatttgacaaagacacatttccatgtgttttcataccgtatttatttgtgtatttttccatctatatctatccccttaactcaaggttttatttttgacaaaaatatacaagattccaccaccataaccccacattattgctccaagtgatagagtcagcagcaggctaatagcaggctcgaaatgggtctttggtgtttggagaccagattagaatgcccaaagcagttagtatgtgcccaagcaaaaacctggaaaaatatttatttctgcttttcagacttgtattggcctttgatttgtgccgagtacaggatgacattaaaaacacaggctcttgttgccctttgacattctacatagcccttccacagtccgcttctaaggaaacagttcttttcctatacttttactacctacacccagaagcagcacatctgtttttaaattcgaaatttcagaattattttttcaaatattaatttttctatgtaattctgaaactcccccctcaccaattatggcttggattttgaaagctgactttggccgggcacggtggctcatgcctgtaatcccagcgcctggcctctctcttcaatttcaaaacaagatcaatttttcatcactctttgctaaacaacaggtattgctctttgatgcataagagggcgaccttttcccctgcagtatttctaccacacaatcagtgtctaattacctattactctcctcccacaaaaatcccaatgtcctaaggtcttggcctgctccatttcatgttcagttgatagaccatttctttcctctaagccacagtactctcctggtaggagaaaggcaccctgaacattatcagaatggtgagtgacatcatagttttacattgtttttcgccactcccaaatgctaattcagatgatacttaattttaaaagcaaagtcctccttcttcacaaattggatagaaataatccttcacctaatcaatgatcttcacccaatcaatgatccttccatcccaatgatctttccaagaaagcaccatggaaggtgtgtaaggatgcacaataagatttcaaagttcacattgaaacgcaatagtaggctttccaaaaaaccttaaataactcagtgaaacatttcataaggtgaaggtaactgactgcctacaaatatcctgcaaccttttcgtatgtgagttaaaaatatataatttttagcatatttggacttgtgagtattctacagtgtataatatcaaaggcaaacagggaaaccagagactgttattcctcctaggaatcctcacttaccatcggtcactgggtaatggcctcaggatgcatattacatttgtttcgtttcatcaaagatataaatcttgatgcctagtaacctgcgaggcctggatagaccctctgccacatatgtttacatgatgtctcttgcttatggcctctcatatctattaatgcttcaactcatgagggattggccactgtcactacatttgtaaggattctgtcaagaatgaaattaactgatgtgaaaggagtgaactgtacctaatgacctcaccacactcatttgtaaggtttctctccggtatgca

SEQ ID NO: 13853 - DNA, 638 bp, Homo sapiens
  misc_feature 1, 620, 628, 629, 630, 631, 632, 633, 634, 635, 636, 637,638: n = A,T,C or G
ncacctctgctttcccgattcaagcaattctcctgcctcagcctcctgagtagctgggattataggcatgcaccaccacacccagctattttttgtatttttactggagacagggtttcaccatgttggccaggctggtctcgaactcctgacctcgtgatccacccgtctcagcctcccaaagtactgggattacaggcgtgagccaccatgcctggccagaaatctatgttttcttagaacatgtggaagaaggaaaaagacaaaaaaggaagtctggattctgaggaccacgtctcacccagggtgacatcaggaatggtgctagcctctgcaacacgacacccagtctgaagagctctatacaggtactaagactagcaggggacaccaagactctgcacaaccagattgcttgtgcagagggccacaataagtgtatgttttatattttattgtattatttattcaaaaataaataatacactcacatgtttccacacccaataaaaaggacgacaaaaaaaaaaaaaaaaaaaaggggggggggctttttttcggggaaaaaaaaaaaccccccccattttcccccgggaaggggaaaaaaaaaaaggcccccngggggggnnnnnnnnnnn

SEQ ID NO: 13854 - DNA, 1019 bp, Homo sapiens
  misc_feature 1, 2, 3, 4, 5, 6, 7, 8, 9, 10, 11, 12, 13: n = A,T,C or G
nnnnnnnnnnnnnagtggaacaggggtcttccccttgttggtcaggctggtctcgaactcctgacctcaggtgatccacccgcctcggccttcaaagtgctggggttacaggcgtgcgccaccgtgcccagcccatccacactttttttgtgagttttacctccagggccttgaccaagatcccacagtgaatattggagaaaaatccccatgtgcttctggcaagggggccagaagggaaccattttgaaatacatcagtcagggcattctgttcttgacaaggccctaccctcagtagaaagtgaccagagcctgactgacctgatggaagggaaagaaccaactctagccagccctggccttccacatggaagaagggaaatacccaactccaatacactctagccatcttgtcctatgcaagggggtcaggggggcctgagaagcatgtgtgaagttcacagttcagtggtacaagctcactaaaagattgagacccctcctaggactatagaacccttcctctccctccatattttatcaccacattactaaaggcctgtttgcagcagttcctcttaacttgtgtgtcatgtccagttatcaagaaaaaaattacaagacatattaaaggcaagaaaaaacagtttgacgagaaagagcaagtatcagaaccagagtcagatatggcagggatgttagaattatacaccaagtgggatttatcccaggtattcaaggctggttcagcattcattcaaaagtcaattaaggtagtccatcatcacatcagcaggctaaagaagaaaaatcatgatcatagcagtagatgcagaaaaagcatttgacaaaatctaacacccacttatgatctcagcaaactaggaagagaggggaacatcctcaacttgataaagaatatctacaaaaacacctatagctaacatcacacttgatgaaaaacttaaaagctatcccactaagatgaggaacaaggcatgctctcactactgcttt

SEQ ID NO: 13855 - DNA, 513 bp, Homo sapiens
  misc_feature 1, 2, 3: n = A,T,C or G
nnngaccttcgaaaagaagtagaaaatcattataagctttctttacctgaagatttctatcacttctggaagttctgtgaagaacttgatcctgaaaagccatctgattcactttctgcaagccttggacttcaattagttggtccttatgatatccttgctggaaaacataaaacgaagaaaaaatcaacaggcctgaattttaaccttcactggaggttttactatgatcctcctgagttccagaccattattattggagataataaaactcagtacaggtcaaagaggtcctctccaagctgagcacgctcgtggaaaccacactcaaagagacagagaagattacagtatgtggggacacccatggccagttctatgacctcctcaacatattcgagctcaacggtttaccctcggagaccaacccctatatatttaatggtgactttgtggaccgaggctccttctctgtagaagtgatcctcacccttttcggcttcaagctcctgt

SEQ ID NO: 13856 - DNA, 554 bp, Homo sapiens
  misc_feature 536, 547, 554: n = A,T,C or G
gcgtccgttttttttgacaggaggaaaaaaaatttaataatatatgtttgcacaggagttccacgaaatatgagactccaagaagggtcagatgattgacactcatacaccatcgtgagctatcgaaaagaacggcagtttgggagttctgcagggagttgaccacagaagtgggagagtgaagggaagaagtgtgtcgtgaataaagcttggctggttttcagataaaaggtcttgcgagtggccaggtgtggtggctcactcctgtcacgtcccagcactttgggaggccaaggcgggcggctcatgaggtcaggagttcgagaccagcctggccaacatagtgaaaccccgtctctactaaaaatgcaaaaaattagctgggcatggtggcaggcactgtaatcccagctacttgggaggctgagacaggggaatcacttgaatccgggagcaggaggttgcaggagcttgagaccgcgccattgcatttccatccccggtgactgtgtgagactcctttaaaaaaaaacggnggaaaaaggtntttgagn

SEQ ID NO: 13857 - DNA, 3535 bp, Homo sapiens
tcgacccacgcgtccgaattccatttatggtagtggagtcagtgatttgaacgaagtactttcagtttcatattactctaaatccattacaaatctgcttagcttctaaatatttcatcaatgaggaaatcccagccctacaacttcggaacagtgaaatattagtccagggatccagtgagagacacagaagtgctagaagccagtgctcgtgaactaaggagaaaaagaacagacaagggaacagcctggacatggcatcagagatccacatgacaggcccaatgtgcctcattgagaacactaatgggcgactgatggcgaatccagaagctctgaagatcctttctgccattacacagcctatggtggtggtggcaattgtgggcctctaccgcacaggcaaatcctacctgatgaacaagctggctggaaagaaaaagggcttctctctgggctccacggtgcagtctcacactaaaggaatctggatgtggtgtgtgccccaccccaagaagccaggccacatcctagttctgctggacaccgagggtctgggagatgtagagaagggtgacaaccagaatgactcctggatcttcgccctggccgtcctcctgagcagcaccttcgtgtacaatagcataggaaccatcaaccagcaggctatggaccaactgtactatgtgacagagctgacacatagaatccgatcaaaatcctcacctgatgagaatgagaatgaggttgaggattcagctgactttgtgagcttcttcccagactttgtgtggacactgagagatttctccctggacttggaagcagatggacaacccctcacaccagatgagtacctgacatactccctgaagctgaagaaaggtaccagtcaaaaagatgaaacttttaacctgcccagactctgtatccggaaattcttcccaaagaaaaaatgctttgtctttgatcggcccgttcaccgcaggaagcttgcccagctcgagaaactacaagatgaagagctggaccccgaatttgtgcaacaagtagcagacttctgttcctacatctttagtaattccaaaactaaaactctttcaggaggcatccaggtcaacgggcctcgtctagagagcctggtgctgacctacgtcaatgccatcagcagtggggatctgccgtgcatggagaacgcagtcctggccttggcccagatagagaactcagctgcagtgcaaaaggctattgcccactatgaacagcagatgggccagaaggtgcagctgcccacagaaaccctccaggagctgctggacctgcacagggacagtgagagagaggccattgaagtcttcatcaggagttccttcaaagatgtggaccatctatttcaaaaggagttagcggcccagctagaaaaaaagcgggatgacttttgtaaacagaatcaggaagcatcatcagatcgttgctcagctttacttcaggtcattttcagtcctctagaagaagaagtgaaggcgggaatttattcgaaaccagggggctatcgtctctttgttcagaagctacaagacctgaagaaaaagtactatgaggaaccgaggaaggggatacaggctgaagagattctgcagacatacttgaaatccaaggagtctatgactgatgcaattctccagacagaccagactctcacagaaaaagaaaaggagattgaagtggaacgtgtgaaagctgagtctgcacaggcttcagcaaaaatgttgcaggaaatgcaaagaaagaatgagcagatgatggaacagaaggagaggagttatcaggaacacttgaaacaactgactgagaagatggagaacgacagggtccagttgctgaaagagcaagagaggaccctcgctcttaaacttcaggaacaggagcaactactaaaagagggatttcaaaaagaaagcagaataatgaaaaatgagatacaggatctccagacgaaaatgagacgacgaaaggcatgtaccataagctaaagaccagagccttcctgtcacccctaaccaaggcataattgaaacaattttagaatttggaacaagcgtcactacatttgataataattagatcttgcatcataacaccaaaagtttataaaggcatgtggtacaatgatcaaaatcatgttttttcttaaaaaaaaaaaaaagactgtaaattgtgcaacaaagatgcatttacctctgtatcaactcaggaaatctcataagctggtaccactcaggagaagtttattcttccagatgaccagcagtagacaaatggatactgagcagagtcttaggtaaaagtcttgggaaatatttgggcattggtctggccaagtctacaatgtcccaatatcaaggacaaccaccctagcttcttagtgaagacaatgtacagttatccgttagatcaagactacacggtctatgagcaataatgtgatttctggacattgcccatgtataatcctcactgatgatttcaagctaaagcaaaccaccttatacagagatctagaatctctttatgttctccagaggaaggtggaagaaaccatgggcaggagtaggaattgagtgataaacaattgggctaatgaagaaaacttctcttattgttcagttcatccagattataacttcaatgggacactttagaccattagacaattgacactggattaaacaaattcacataatgccaaatacacaatgtatttatagcaacgtataatttgcaaagatggactttaaaagatgctgtgtaactaaactgaaataattcaattacttattatttagaatgttaaagcttatgatagtcttttctaattcttaacactcatacttgaaatctttctgagtttccccagaagagaatatgggattttttttgacatttttgactcatttaataatgctcttgtgtttacctagtatatgtagactttgtcttatgtgtcaaaagtcctaggaaagtggttgatgtttcttatagcaattaaaaattatttttgaactgaaaatacaatgtatttcactaggcttcttatttctgattatcttttttgcagttatttttatcagaaaataaggttttactctttatagcaatggctggtaatcttttctgtaaaataccagatagtaacgatttatggctttgcaggtcatacagtctctgtctgaattactcagctctgcatgtagtgcaaacgcagccatagaaaatacataaaccaataggtgtggctatgttccaatcaattttaactttcaataacaggatggcacccataaaccatagtttgcagaactctgttttacagaaacattggtcagagttttatatacctgcattgtgttactcacatgtataaaaatcatatggattagactatatatattacaatcttgaaaaaactatgcggttattcaaaataacacagtgagaaaaaagcaaggaagcagctaatgccattaaatcccca

SEQ ID NO: 13858 - DNA, 909 bp, Homo sapiens
  misc_feature 1, 535, 536, 537, 540, 542, 543, 544, 545, 546, 547, 548,549, 550, 551, 552, 553, 554, 555, 556, 557, 558, 559, 560,561, 562, 563, 564, 565, 566, 567, 568, 569, 570, 571, 572,573, 574, 575, 576, 577, 578, 579, 580, 581, 582, 583: n = A,T,C or G
  misc_feature 584, 585, 586, 900, 901, 902, 903, 904, 905, 906, 907, 908,909: n = A,T,C or G
ncgtccgattagacgaggttctgtgttatcaccttaaagtagaagaacccgtgaagaaggttcttgagaaaaagttccatactgtcagtggaagcaagtgtgagatcaaggtggcccagcccaaagaagtctatcagcagcagcagtatggctctgggggccgtggaaaccgcaaccgagggaaccgaggcagcggaggtggtggtggaggtggaggtcagagtcagagttggaatcagggctacggcaactactggacctgtggaccctggttgtaaagagtaaattgtatcttaggaaaccagtgtcacctttttttcaccttttaataattttatattatttgcgtcatacatttcctgtaacggaagtgttaattttactgtactttttggtaccttttgggaatctaatgtattgtaaggtattttacacgtgtcctgattttgccacaacctggatattgaagctatccaagcttttgaaataaaatttaaaaaccaaaccccccccaacgccccccctggtgagtgcnnnccncnnnnnnnnnnnnnnnnnnnnnnnnnnnnnnnnnnnnnnnnnnnnnctccccggggggccgaggaaaaaggacctaagggggcctggaaaaagggttgaaatcagccccaaaaacccaattttttccaaggggaatttaaacttggccaagggtttaatccccaattttttaaggttgttccgaacaagggaaaaaaaagggaatttttaaaagggggaaagggccaaattcataataaaggccgggggaaaaacacacacaaagggtttaaccacaactttttttggaaaaggacccgggaacaatttaaaacggtgggggctgggaaagcccctttatttaaacggccagggaaaaannnnnnnnnn

SEQ ID NO: 13859 - DNA, 944 bp, Homo sapiens
  misc_feature 253, 254, 255, 256, 257, 258, 259, 260, 261, 262, 263, 264,265, 266, 267, 268, 269, 270, 271, 272, 273, 274, 275, 276,277, 278, 279, 280, 281, 282, 283, 284, 285, 286, 287, 288,289, 290, 291, 292, 293, 294, 295, 296, 297, 298, 299: n = A,T,C or G
  misc_feature 300, 301, 302, 303, 304, 305, 306, 307, 308, 309, 310, 311,312, 313, 314, 315, 316, 317, 318, 319, 320, 321, 322, 323,324, 325, 326, 327, 328, 329, 330, 331, 332, 333, 334, 335,336, 337, 338, 339, 340, 341, 342, 343, 344, 345, 665: n = A,T,C or G
ccacgcgtccgggaaccatggacaccccagcgcagcttctcttcctcctgctactctggctcccagatgccaccggagaaattttgttggcgcagtctccggtcgccctatctttatctccaggggaaagagccaccctctcctgcagggccactcagagtgttaacagcaggtccttagcctggtaccagcagaaacctggccaggctcccaggctcgtcatctatgctgcatccaccagggccactggcannnnnnnnnnnnnnnnnnnnnnnnnnnnnnnnnnnnnnnnnnnnnnnnnnnnnnnnnnnnnnnnnnnnnnnnnnnnnnnnnnnnnnnnnnnnnagcagcgtagcaactggcctctattcactttcggccctgggaccaaagtggatatcaaacgaactgtggctgcaccatctgtcttcatcttcccgccatctgatgagcagttgaaatctggaactgcctctgttgtgtgcctgctgaataacttctatcccagagaggccaaagttcagtggaagggtgattacgccctccaatcgggtaactcccaggagagtgtttcagagcagggcagccagggcagcaccttcagcctcagcagccccctgtcggtgagcaaagcagggttcgagaaacacaaagttttcgcctgnggagtcccccatcagggcctgaggttgcccgttcccaaagaagtttcaccaggggagagtgttagagggagaagtgcccccccctgctcctcagtttcagcctgaccccctcccatcctttggcctttgaccctttttccccagggggcctacccctattgggggcctccaggttattttttccctcccccccctcctcctccttgggttttattatggtaatgttgggggagagatgaataaataaaagtgaattccttgcccctgtggaaaaaaaaa

SEQ ID NO: 13860 - DNA, 740 bp, Homo sapiens
  misc_feature 1, 717, 718, 719, 720, 721, 722, 723, 724, 725, 726, 727,728, 729, 730, 731, 732, 733, 734, 735, 736, 737, 738, 739,740: n = A,T,C or G
nacaaagcaagactcggtctcaaaaaaattaaccaacaaataaatattaaaaccctaagccctctgactgattgaacagaccccttttgcccaaggtgacccccaaaaaactaaaaactaagtttcccggccgtaaggagatgggaaattgcgcctccgtataccccttcctcactgttaccagggtttttttttgtttgtttcccaaattaaacagaaacaagccctggaaaaacaaagaatggaacacccctccgctgacttcaaccaactgcctgctgatgcggcctgactcccagccctttttgcagttttgaagtgacaaactgactaggctacaaagtattcaaccatgggctggttctggctggttcaccgaggctgtgtacaaagtgtcttcgtgtcctgtgtttcaccttttaacatacagaacctaattttactgcattttaatgttaattctccactcgaaggtgaacatgggatgtatgtaacacatatgtttgcttatcaagcacacatatgaccccctttcatgaatattcatagttccccctgtgacctgttgaatatgtctgtttagccaacctgtttggcataaaactcctatcccaccctatctccctcaaagtacctgtttgtggtctcagctggaggtgccacttcccagcctgcagtttgcaacccttctcaagaaataaagttttcctttccaannnnnnnnnnnnnnnnnnnnnnnn

SEQ ID NO: 13861 - DNA, 1658 bp, Homo sapiens
aaggaaaatgttagtgtgctgaggaaccacgaacatactattaacatcactgtcactactactgagacagccaagtaaaaagggctccctggcagaagctcccacaggcctgagcactgggaggaatgcgcactggggtggagcctcaggaagttcacgccttttgcagtggggaggagcctggcctctcctgttgcagcgtagtaacctggaattcagtgtgcgaggtggaaaactggctagccggcttctcgctttgctgatagtccttctttcccttttcatccaataaaccctgtcctggtcacccttcaaagtgtctgtgagcctaatttgtcatggttgtgtgacgagaaccccgtttttagctcaactaaagacaaagttctacaacaccactataaccctttatagcttctagatcttgatctaaggccctgggaatgatactcctacctaaaaagagtttcccaccaagactacctgtttatttccaatttgtatctcatttaatctattgtgctatcaaatgcaaggacatttttctagatgcagatgttatatattaaaagaaagggaggaaagagaaaggcttggttctggaagaggatagagagtgtgaagccttgtaagccaccagactgacagaaagccgtgggcaaccctaggagactgagaaaaagaaacctcctgacaacacagccaagcagaacaccagaaagaactacctacgccccaagtttccctaaggccagccgtggctacataattcgtcatatactataaatgaaatgggtgtagtttgaaatattgctttccactaatattaatttcaagaatctacttttttaaaatgaatataataactttgaaatctgtttttgctgcttttcctgattttttaactactcatacaatagtctggtaactggtattctttttaagcagggaactcctggattcaaatacctgataattaaaggatcttttgatattttggcagttactctcactaaaagaagttacattcagcagattagaatgattcatgagaaattcttggttagtaaatatttaatccagattttataattgcctaaatctctttataggttatttcttgcaatatttcaagatcctgagtcagccatgcttatacaagcaaacttttatttactgtgtttctttgtgcatctctggtgtctattaacatagtacaaggtagtgggtcgctgcctgcccacccccaaatgccacacgccgcccctctaccgcatgcgaatctttgcgcctaatcatgtcgtcgccaagtcccgcttctggtacatgttgtgggtgccgctccgggagtcatagcgcagccagatcccgaagttcttcacccgcaggggggacttctcaaacacctgcccacagtagacaatctcccctgaagacttcttcatcttctttaactgagatacaaagtaccagaagcgggacttggcgacgacatgattaggcgcaaagattcgcatgcggtagaggggcggcgtgtggcatttgggggtgggcaggcagcgacccactaccttgtactctcgtagcgtgcccgaggccttcatggcgtgctctccgcgttcgccgccacccgcaaaaaaaaaaaaaaagtgcgagct

SEQ ID NO: 13862 - DNA, 266 bp, Homo sapiens
  misc_feature 61, 66, 67, 82, 105, 146, 166, 199, 266: n = A,T,C or G
acagagtggtgcaggatggaagccattcagagcctgatgaaatggaacagaaaactcccanttttnnctgtcacctgtcaancttcctgtaattcaaatcacccnttgaataaaactaaatggtgccttctgtagttcagcatatnaagtcaggtgcaacctgagngcattgcacagtacctgcccgggcgtcgagcgngccgcccgggcaggtacatttgttttgcccagccaatcactcttttttgtgaggagcctaaatacan

SEQ ID NO: 13863 - DNA, 843 bp, Homo sapiens
  misc_feature 1, 24, 836, 837, 838, 839, 840, 841, 842, 843: n = A,T,C or G
nggtcatgcagcccctgtcacgtnaccccttgctgctcaaatcaatcacgaccctttcatgtgaaattttagtgttgtgagctcttaaaagcgacagaaattgtgcactcggggagctcggattttaaggcagtagcttgccaatgctcccagctgaataaagcccttccttctacagctccgtgtctgagaggttttgtctgtggcttgtcctgctacagtccttggttccctgaccaggaagcgaggtgactgacaagccctgtggagccccgtggagcgtccctgcagaggactccggccagcctgagtgacgcaatccaaagagcgctcccgggtaggaaatggccccggtggaacgccttgccagagcagcgcatagcaggctcccgagaaggattaacactggctgaacaccgggaaggaactggcacttgaagtccagacatctgaagcttgtcaagactagtctttggaacttgccccactccatgtgagtggaagcatggcctgatcacccacggtgtgcctgtattgacatctttgttctggctttggcttggcttgacttggtaagactagtctttggaacttgccccactccacgtgagtggaagcgtggcctgatcacccacggtgtgcctgtattggcacttttgttctggttttgacttggcttgacttggtaagactagtctttggaacttgccccactccatctgagtggaaacgtggcctgatcacccacagcatgcctgcatgggcactcttgttctggttttgacttgacttgaattgctggatactttggttttggttttgacttggcttgaaannnnnnnn

SEQ ID NO: 13864 - DNA, 1825 bp, Homo sapiens
  misc_feature 1, 2, 3, 4, 5, 6, 1681, 1822, 1823, 1824, 1825: n = A,T,C or G
nnnnnnatgatgagaagtctataaaaattgtgtgctaccaaagatcggcccacgcgtccggctgctgcctcacccacagcttttgatatctaggaggactcttctctcccaaactacctgtcaccatggcccaccgatttccagccctcacccaggagcagaagaaggagctctcagaaattgcccagagcattgttgccaatggaaaggggatcctggctgcagatgaatctgtaggtaccatggggaaccgcctgcagaggatcaaggtggaaaacactgaagagaaccgccggcagttccgagaaatcctcttctctgtggacagttccatcaaccagagcatcgggggtgtgatccttttccacgagaccctctaccagaaggacagccagggaaagctgttcagaaacatcctcaaggaaaaggggatcgtggtgggaatcaagttagaccaaggaggtgctcctcttgcaggaacaaacaaagaaaccaccattcaagggcttgatggcctctcagagcgctgtgctcagtacaagaaagatggtgttgactttgggaagtggcgtgctgtgctgaggattgccgaccagtgtccatccagcctcgctatccaggaaaacgccaacgccctggctcgctacgccagcatctgtcagcagaatggactggtacctattgttgaaccagaggtaattcctgatggagaccatgacctggaacactgccagtatgttactgagaaggtcctggctgctgtctacaaggccctgaatgaccatcatgtttacctggagggcaccctgctaaagcccaacatggtgactgctggacatgcctgcaccaagaagtatactccagaacaagtagctatggccaccgtaacagctctccaccgtactgttcctgcagctgttcctggcatctgctttttgtctggtggcatgagtgaagaggatgccactctcaacctcaatgctatcaacctttgccctctaccaaagccctggaaactaagtttctcttatggacgggccctgcaggccagtgcactggctgcctggggtggcaaggctgcaaacaaggaggcaacccaggaggcttttatgaagcgggccatggctaactgccaggcggccaaaggacagtatgttcacacgggttcttctggggctgcttccacccagtcgctcttcacagcctgctatacctactagggtccaatgcccgccagcctagctccagtgcttctagtaggagggctgaaagggagcaacttttcctccaatcctggaaattcgacacaattagatttgaactgctggaaatacaacacatgttaaatcttaagtacaagggggaaaaaataaatcagttattgaaacataaaaatgaataccaaggacctgatcaaatttcacacagcagtttccttgcaacactttcagctccccatgctccagaatacccacccaagaaaataataggctttaaaacaatatcggctcctcatccaaagaacaactgctgattgaaacacctcattagctgagtgtagagaagtgcatcttatgaaacagtcttagcagtggtaggttgggaaggagatagctgcaaccaaaaaagaaataaatattctataaaccttcacaaaaaaaaaagaacaaaccctcgaggnggggcccggtacccaattcgccctatagtgagtcgtattacaattcactggccgtcgttttacaacgtcgtgactgggagctggcgtaataagcgaagaagcccggaccgatcgcccttcccacagttgcggcagctgaannnn

SEQ ID NO: 13865 - DNA, 708 bp, Homo sapiens
  misc_feature 671, 707, 708: n = A,T,C or G
acatcttcttccggctgataattgcattatggatgaacacaaacgagaaattgcggaagctaagcaaattgttagaaagcttacgatggttgtgttgtcttctgaaaaaatggatgagcgagagaaagaaaaggaaaaagaagaggagaaagtagagaaaccacctgataaccaaaaacttggcttgttggaagccttattaaagattggtgattggcaacatgcacagaacattatggatcagatgcctccatactatgcagcttcacacaagctaatagcccttgctatttgcaagctcattcatataactattgagcctctctaccgaagagttggagttcctaaaggtgctaaaggctcacctgttaatgctttgcaaaacaagagagcaccaaaacaagctgagagctttgaagatttgaggagagacgtgttcaatatgttctgttaccttggtcctcacctttctcacgatcccattttatttgcaaaagtggtgcgcataggcaagtcatttatgaaggagtttcagtctgatggaagcaaacaagacgatcaagaaaaaacggaagttatccttagctgtttgcttagcattactgaccaggtactacttccatctctgtctttgatggactgcaatgcttgatgtctgaggaactatgggngatgtttaaaacatttccatatcagcatagatatcnn

SEQ ID NO: 13866 - DNA, 202 bp, Homo sapiens
  misc_feature 202: n = A,T,C or G
acttgttattatcacaaatcctaaatgttttaccaagtgctgtcttgatgactgctgattttctggaatggaaaattaagttgtttagtgtttatggctttgtgagataaaactctccttttccttaccataccactttgacacgcttcaaggatatactgcagctttactgccttcctccttatcctacagtacctgcccn

SEQ ID NO: 13867 - DNA, 888 bp, Homo sapiens
  misc_feature 888: n = A,T,C or G
acgcggggagggcgtgcggagttggctgctccggggttagcaggtgagcctgcgatgcgcgggaagacgttccgctttgaaatgcagcgggatttggtgagtttcccgctgtctccagcggtgcgggtgaagctggtgtctgcggggttccagactgctgaggaactcctagaggtgaaaccctccgagcttagcaaagaagttgggatatctaaagcagaagccttagaaactctgcaaattatcagaagagaatgtctcacaaataaaccaagatatgctggtacatctgagtcacacaagaagtgtacagcactggaacttcttgagcaggagcatacccagggcttcataatcaccttctgttcagcactagatgatattcttgggggtggagtgcccttaatgaaaacaacagaaatttgtggtgcaccaggtgttggaaaaacacaattatgtatgcagttggcagtagatgtgcagataccagaatgttttggaggagtggcaggtgaagcagtttttattgatacagagggaagttttatggttgatagagtggtagaccttgctactgcctgcattcagcaccttcagcttatagcagaaaaacacaagggagaggaacaccgaaaagcttggaggatttcactctgataatattcttcctcatattatatttccgcggcgtgctcccagagtaccgcccaggttccttcttccgattcttcgaactccaggtgcgcatgtggtggggggttgcttccttggcgcccaaagccggtctggacgggttaggccgccgcatgtcgcgtatatagtgtggtttccttaacgggaacccgtggcagggggggcgccagctgcgcgcggggccacagctctcgn

SEQ ID NO: 13868 - DNA, 249 bp, Homo sapiens
gtacaagctttttttttttttttttttttacacgtgttctttaatattcaggcttgagtaaaatgactttaaatgacaggcagtaaaacacaactcagtgagtgcacagtcgacacaattttaacatcccaacagtcctaaatgtgtctcggggtcagaaagttcaccctgaattatctttacagcttttatttactatgtacctgcccgggcggccgcccgggcaggtaccagggagccacacaaatg

SEQ ID NO: 13869 - DNA, 743 bp, Homo sapiens
aggtacgcggggaggaactgctcagttaggacccagagggaaccatggaagccccagctccacttctcttcctcctgctactctggctcccagataccaccggagaaattgtgttgacacagtctccagccaccctgtctttgtctccaggggaaagagccaccctctcctgcagggccagtcagagtattagcaactacttagcctggtaccagcagagacctggccaggctcccaggctcctcatctatggcgcatccagcagggccactggcatcccagacaggttcagtggcaattcgtctgggacagacttcagtctcaccatcgccagactggagcctgaagattctgcagtttactattgtcagcactatggtacctcattatggacgttcggccaagggaccagagtggaactcaaacgaactgtggctgcaccatctgtcttcatcttcccgccatctgatgagcagttgaaatctggaactgcctctgttgtgtgcctgctgaataacttctatcccagagaggccaaagtacagtggaaggtggataacgccctccaatcgggtaactcccaggagagtgtcacagagcaggacagcaaggacagcacctacagccttagcagcaccctgacgctgagcaaagcagactacgagaaacacaaagtctacgcctgcgaagtcacccatcagggcctgagctcgcccgtcacaaagagcttcaacagggagagt

SEQ ID NO: 13870 - DNA, 488 bp, Homo sapiens
  misc_feature 195, 196, 197, 198, 199, 200, 201, 202, 203, 204, 205, 206,207, 208, 209, 210, 211, 212, 213, 214, 215, 216, 217, 218,219, 220, 221, 222, 223, 224, 225, 226, 227, 228, 229, 230,231, 232, 233, 234, 235, 236, 237, 238, 239, 240, 241: n = A,T,C or G
  misc_feature 242, 243, 244, 245, 246, 247, 248, 249, 250, 251, 252, 253,254, 255, 256, 257, 258, 259, 260, 261, 262, 263, 264, 265,266, 267, 268, 269, 270, 271, 272, 273, 274, 275, 276, 277,278, 279, 280, 281, 282, 283, 284, 285, 286, 287, 288: n = A,T,C or G
  misc_feature 289, 290, 291: n = A,T,C or G
cctacggggacatcgtgatgacccagtctcctgactccctggctgtgtctctgggcgggagggccaccatcaactgcaagtccagccagagtgttttatacaactccaacaaaaagaactacttagcttggtaccagcagaaaccaggacagtctcctaagttgctcatttcctgggcatctgcccgggaatccnnnnnnnnnnnnnnnnnnnnnnnnnnnnnnnnnnnnnnnnnnnnnnnnnnnnnnnnnnnnnnnnnnnnnnnnnnnnnnnnnnnnnnnnnnnnnnnnnagcaatattatgctactcgtgcgctcactttcggcggagggaccaaggtggagatcaaacgaactgtggctgcaccatctgtcttcatcttcccgccatctgatgagcagttgaaatctggaactgcctctgttgtgtgcctgctgaataacttctatcccagagaggccaaagtacctgcccgggcggccgctcga

SEQ ID NO: 13871 - DNA, 1518 bp, Homo sapiens
caccgcggtggcggccgaggtacgcgggggaggaactgctcagttaggacccagacggaaccatggaagccccagcgcagcttctcttcctcctgctactctggctcccagataccactggagaaatagtgatgacgcagtctccagccaccctgtctgtgtctccaggggaaagagccaccctctcctgcagggccagtcagagtgttggcagcaactttgcctggtaccagcagaaacctggccaggctcccaggctcctcatctatggtgcatccaccagggccactggtatcccagacaggttcagtggcagtgggtctgggacagagttcactctcaccatcagcagactggaggctgaagattttgcaacctactactgcatgcaatataataactggcctccggggctcactttcggccaagggaccaagctggagatcaaacgaactgtggctgcaccatctgtcttcatcttcccgccatctgatgagcagttgaaatctggaactgcctctgttgtgtgcctgctgaataacttctatcccagagaggccaaagtacctgcccgggcggccgcccgggcaggtacttttttttcttctgctgcttttctggactctgccagtgttttaaaatctgctttaaatgctctgaaatcaactttatttttcgtaatgtccttagagctggtcccatctcgcacaaatagtgagaattttttactttgttcccatattttgttgttgtaattttgcattttaatctggaagtaatcatattggcattcagagaactgtggaataatgtccacttcaataacaaatctgtcagatagagtactatttggcagtaaaacttccacaaatcttggctctcgaatgcacttctttgcttgttggacttgatggtcttcaaaatacttgtttatcatcagattgaaatggttaatgagggcttccttggtatcattggtgactttgatgccaacaattttcccatggggtttgtctttgactccaaaatgaatagtgccattggtacgtgaattcatacaagctgaagcaaatcggaaaacctcattgctaaatttcatcttgacatcctcttctgtggctgttgctgtatttgtgaaggctttgaattcatgtatcggatcaatgagattgcctggtcctgtttcaggctgtagactaaaatccaacttgtaacgatatggattactgaattcatcaaatggatatgatacacatgtcaggtctatggatggttgcctttcctttgtataatctattttatcttctatgagctcaacttttagtgacttagaacctttagcagttgtactcattgcagacggattagccatatctgggttctctttacccttttgtttttgctttgaagtttctctacgttccttttgagacacagtttggtctttaggagcatttttactgggctttcccatcttagatgtctgaatcgaatcttcaatggctgttttccgcaatc

SEQ ID NO: 13872 - DNA, 696 bp, Homo sapiens
  misc_feature 256, 257, 258, 259, 260, 261, 262, 263, 264, 265, 266, 267,268, 269, 270, 271, 272, 273, 274, 275, 276, 277, 278, 279,280, 281, 282, 283, 284, 285, 286, 287, 288, 289, 290, 291,292, 293, 294, 295, 296, 297, 298, 299, 300, 301, 302: n = A,T,C or G
  misc_feature 303, 304, 305, 306, 307, 308, 309, 310, 311, 312, 313, 314,315, 316, 317, 318, 319, 320, 321, 322, 323, 324, 325, 326,327, 328, 329, 330, 331, 332, 333, 334, 335, 336, 337, 338,339, 340, 341, 342, 343, 344, 345, 346, 347, 348, 349: n = A,T,C or G
  misc_feature 350, 351, 352, 353, 354, 355: n = A,T,C or G
tcgacccacgcgtccgcagagggaaccatggaaaccccagcgcagcttctcttcctcctgctactctggctcccagatgtcaccggagaaattgtgttgacgcaggctccaggcaccctgtctttgtctccaggggaaagagccaccctctcctgcagggccagtcagagtgttagcagcagctacttagcctggtaccagcagaaacctggccaggctcccaggctcctcatgaatgctgcctccagcagggccnnnnnnnnnnnnnnnnnnnnnnnnnnnnnnnnnnnnnnnnnnnnnnnnnnnnnnnnnnnnnnnnnnnnnnnnnnnnnnnnnnnnnnnnnnnnnnnnnnnnagcagttcggtagcccaccaacgttcggccaagggaccaaggtggaaatcaaacgaactgtggctgcaccatctgtcttcatcttcccgccatctgatgagcagttgaaatctggaactgcctctgtggtgtgcctgctgaataacttctatcccagagaggccaaagtacagtggaaggtggataacgccctccaatggggtaactcccaggggagtgtcacagagcaggactagcagagggacagaacatatcagcctgagcagcaacctgagcgctgagcaaagcagactagcgagataacacataagtgaacgcctgcgaacctatgaggggggaaa

SEQ ID NO: 13873 - DNA, 1097 bp, Homo sapiens
  misc_feature 1097: n = A,T,C or G
gagtcgagtcgacccacgcgtccgattgtacagtcaggaagaagtactctcatgtggacctggtggtgatggtagatggctttgaaggcgaaaagggggtcctggtgttcctggaacaggctctcatccagtatgcccttcgcacctgggaagtcggggctacattcccatttataccccctttttcatgaggaaggaggtcatgcaggaggtggcacagctcagccagtttgatgaagaactttataaggtgattggcaaaggcagtgaaaagtctgatgacaactcctatgatgagaagtacctgattgccacctcagagcagcccattgctgccctgcaccgggatgagtggctccggccggaggacctgcccatcaagtatgctggcctgtctacctgcttccgtcaggaggtgggctcccatggccgtgacacccgtggcatcttccgagtccatcagtttgagaagattgaacagtttgtgtactcatcaccccatgacaacaagtcatgggagatgtttgaagagatgattaccaccgcagaggagttctaccagtccctggggattccttaccacattgtgaatattgtctcaggttctttgaatcatgctgccagtaagaagcttgacctggaggcctggtttccgggctcaggagccttccgtgagttggtctcctgttctaattgcacggattaccaggctcgccggcttcgaatccgatatgggcaaccaagaagatgatggacaaggtggagttgtccatatgctcaatgctaaccatgtgcgccactacccgtaccatctgcgccatcctggagaactaccagacagagaagggcatcactgtgcctgaggaaattgagggttcatggccgcaggactgagaatgatcccctttgtgaaggcctggcccttggagcggagccatcaaaggaggcgaagaagcactgagggggaaaagaaagcgcgagaagttccttaaaaaaggcggaacatggggcccgcggtgaaatccgccccatggcggacaggtgggaacagcgccaagggggaacgcttatcccccctttgggtagggagggcacan

SEQ ID NO: 13874 - DNA, 300 bp, Homo sapiens
  misc_feature 300: n = A,T,C or G
ctagataagcagcacaatgaggaacagagtggtgacgagctattggatgttgtcactgtgccatcaggtgaacttcgtcatgtggaaggcaccattattctacacattgtgtttgccatcaaattggactatgaactaggcagagaactcgtgaaacacttaaaggtagcatcaaacttgtaaggtgatctgggtctcttttgaatgaaagtgtttgaacttaagcccctgttatgccagttaatgacaggaaataaatactgtaaaatgtccaaaaaaagaaaaaaaaaaaaccacaan

SEQ ID NO: 13875 - DNA, 5918 bp, Homo sapiens
ctgtgaaaagattaaccggagtttaagagtgataggatgacggatgcccagatggctgacttcggggcggcacgatacctccgcaagtcagagaaggagcgcctagaggcccagacccggccctttgacatccgcacagagtgcttcgtgcctgatgacaaggaggagtatgtcaaggccaagatcgtgtcccgggaagggggcaaggtcactgccgaaactgaaaacggcaagacggtgactgtgaaggaggaccaggtgatgcagcagaaccctccgaaattcgacaagatcgaggacatggccatgctgaccttcctgcatgagccagctgtgctctacaatctcaaggagcgctatgcggcctggatgatctatacctactcaggcctcttctgtgtcaccgtcaacccctataagtggctgccagtgtacaatgcggaagtggtagctgcctaccggggcaagaagaggagcgaggctccaccccacatcttctccatctctgacaacgcctatcagtacatgctgacagatcgggagaaccagtccatcctcatcactggagaatccggagcggggaagactgtcaacacgaagcgtgtcatccagtactttgctagcattgcagccataggggaccgtagcaagaaggacaatcctaatgcaaacaagggcaccctggaggaccagattatccaggctaaccctgctctggaggcctttggcaacgccaagactgtccggaatgacaactcctcccgctttgggaagttcatcaggatccactttggagccacaggaaagctggcttctgcagacatagagacctaccttctggagaagtcccgggtgatcttccagctaaaggctgagaggaactaccatatcttctaccagatcctgtccaacaagaagccggagctgctggacatgctgctggttaccaacaacccgtacgactatggcttcatctccagggagaggtgtctgtggcctccattgatgactccgaggagcttttggccactgatagcgcctttgatgtgctgggcttcacagcagaggagaaggccggtgtctacaagctgacaggcgccatcatgcactatgggaacatgaagttcaagcagaagcagcgggaggagcaggcggagccagacggcacagaagatgctgacaaatctgcctacctcatggggctgaactcagccgacctgctcaagggtctgtgtcaccctcgggtgaaggtgggtaacgagtatgtcaccaaggggcagagtgtacagcaggtgtactattccatcggggcactggccaagtcagtgtacgagaagatgttcaactggatggtgacacgcatcaacgcaaccctggagaccaagcagccacgccagtacttcataggtgtcctggacatcgccggctttgagatctttgatttcaacagctttgagcagctgtgcatcaacttcaccaatgagaagctgcagcagttcttcaaccaccacatgttcgtgctggagcaggaggagtacaagaaggaaggcatcgagtggacgtttattgacttcggcatggacctgcaggcctgcatcgacctcatcgagaagcccatgggcatcatgtccatcctggaggaggagtgcatgttccccaaggccacggacatgaccttcaaggccaagctgtacgacaaccacctgggcaagtccaacaacttccagaagcctcgcaatgtcaaggggaagcaggaagcccacttctctctggtccactatgctggcaccgtggactacaacatcttgggctggctggagaagaacaaggaccctctcaacgagacggtggtggggctgtaccagaagtcctccctcaaactcatggccacactcttctccacctatgcttctgctgataccggtgacagtgggaaaggcagaggaggcaagaagaaaggctcatccttccagacagtgtctgctctccaccgggaaaatctgaacaagctgatgacaaacctgaggaccacccatcctcactttgtgcgctgcatcatccccaatgagcggaaggctccaggggtgatggacaaccccctggtcatgcaccagctgcgatgcaacggagtgctggagggtatccgcatctgtaggaagggcttccccaaccgcattctttatggggacttccggcagaggtatcgaatcctgaacccagcagccatccctgaggggcaattcattgatagcaggaaaggggctgagaagctgctgggctccctggacattgaccacaaccagtacaagtttggccacaccaaggtgttcttcaaggcggggctgctggggctgctggaggagatgcgagatgagaggctgagccgcatcatcaccagaatccaggctcaagcccgaggccagctcatgcgcattgagttcaagaagatggtggagcgcagggacgccctgctggttatccagtggaacatccgcgccttcatgggggtcaagaattggccgtggatgaagctctacttcaagatcaagccgctgctgaagagcgcagagacagagaaggagatggccaacatgaaagaggagttcgggcgagtcaaagatgcactagagaagtctgaggctcgccgcaaggagctggaggagaagatggtgtccctgctgcaggagaagaatgacctgcagctccaagtgcaggcggaacaagacaacctggcagatgccgaggagcgctgcgaccagctgatcaagaacaagatccagctggaggccaaggtgaaggagatgaccgagaggctggaggacgaggaggagatgaacgccgagctcacggccaagaagcgcaagctggaagacgagtgctcagagctcaagaaagatatcgatgacctggagctgaccctggccaaggtggagaaggaaaagcacgcaacagagaacaaggttaaaaacctgacagaggagatggccgggctggacgagatcattgccaagctgaccaaggagaagaaagctcttcaagaggcccaccagcaagccctagatgaccttcaggctgaggaagacaaggtcaacacactgaccaagtctaaagtcaagctggagcagcaggtggatgatctggagggatccctggagcaggagaagaaggtgcgcatggacctggagcgagcaaagcggaagctggagggtgacctgaagctgacccaggagagcatcatggacctggagaacgacaagcttcagctggaggaaaagctcaagaagaaagagtttgacatcagtcagcagaacagtaaaatagaggatgagcaggccctggcccttcagctgcagaagaaactgaaggaaaaccaggcacgcatcgaggagctggaggaggagctagaggcggagcgcacagcccgggccaaggtggagaagctgcgctcagacctgacccgggagctggaggagatcagtgagaggctagaggaagccggtggggccacatctgtgcagatagagatgaacaagaagcgcgaggccgagttccagaagatgcggcgggacctggaggaagccacgctgcagcatgaggccacagccgcggccctgcgcaagaagcacgcagacagcgtggccgagctgggcgagcagatagacaatctacagcgggtgaagcagaagctggagaaagagaagagcgagttcaaactggagctggatgacgtcacctctcacatggagcagatcatcaaggccaaggcaaacctggagaaagtgtcccggacactggaggaccaggccaatgaataccgggtgaagttggaagaagcccagcgctccctcaatgacttcaccacacagcgagccaagctgcagacagagaatggcgagttggctaggcaactggaagaaaaggaggcactgatttggcagctgacccggggcaagctctcctatacccagcagatggaggacctcaagaggcagctggaggaggaaggcaaggccaagaatgccttggcccacgcactgcagtcagcccggcatgactgcgacctgctgcgggaacagtacgaagaagaaatggaggccaaggccgagctgcagcgtgtcctgtccaaggccaactcagaggtggcccagtggaggaccaagtatgagacggacgccatacagaggacggaggagctggaggaagccaagaagaagctggctcagaggcttcaggatgctgaggaggcagtggaggccgtcaacgccaagtgctcctctctggagaagaccaagcacaggctgcagaacgagatcgaggacctgatggtggatgtggagcgctccaatgcggcctccactgccctggacaaaaagcagaggaacttcgacaagatcctggctgagtggaagcagaagtatgaggagtcccagtcagagctggagtcttcccagaaggaggcgcgctccctgagcacagagctcttcaagctcaagaatgcctatgaggagtctctggagcacctggagaccttcaagcgggagaacaagaacctccaggaggagatctcagacctgactgaacagctgggagaagggggtaaaaatgtgcacgagctggagaagatccgcaaacagctggaggtggagaagctggaactgcagtcagccctggaggaggctgaggcctccctggagcatgaggagggcaagatcctccgagcccagctggagttcaaccagatcaaggcagagatcgaaaggaagctggcagagaaggacgaggagatggagcaggccaagcgcaaccacctgcgggtggtggactccctgcagacctccctggatgccgagacgcgcagccgcaacgaggccctgcgggtgaagaagaagatggagggcgacctcaatgagatggagatccagctcagtcaggccaatagaatagccttagaggcccagaagcacttgaagaacgcccaagcccacttgaaggacacccagctccagctggatgacgcagtccgtgccaatgacgacctgaaggagaacatcgccatcgtggagcggcgcaacaccctgctgcaggcggagctggaggagctgcgggccgtggtggagcagacagagcggtctcggaagctggcagagcaggagctgatcgagaccagcgagcgggtgcagctgctgcactcccagaacaccagcctcatcaaccagaagaagaagatggatgcagacctctcccagctccagacagaggtggaggaggcggtgcaggagtgtaggaacgcagaggagaaggccaagaaggccatcacagatgccgccatgatggccgaggagctgaagaaggagcaggacaccagcgcccacctggagcgcatgaagaagaacatggagcagaccatcaaggacctgcagcaccggctggacgaggcagagcagatcgccctcaagggtggcaagaagcagctgcagaaactggaggcccgggtccgggagctggagaatgagctggaggctgagcagaagcgcaatgcggagtcggtgaagggcatgaggaagagcgagcggcgcatcaaggagctcacctaccagacagaggaagacaagaagaacttggtgcggctgcaggacctggtggacaagctgcagttgaaggtgaaggcctacaagcgccaggctgaagaggcggaggaacaggccaacaccaacctgtccaagttccgcaaggtgcagcacgagctggatgaggcagaggagagggcggacattgccgagtcccaggtcaacaagctgcgggccaagagccgtgacattggcgccaagcagaaaatgcacgatgaggaataacctgtccagcagaaagagcctcgctgttgctatcccacaataaatatgaatgcttgactttgcctg

SEQ ID NO: 13876 - DNA, 1619 bp, Homo sapiens
  misc_feature 1331, 1332, 1334, 1378, 1379, 1380, 1381, 1382, 1383, 1384,1385, 1386, 1387, 1388, 1389, 1390, 1391, 1392, 1393, 1394,1395, 1396, 1397, 1398, 1399, 1400, 1401, 1402, 1403, 1404,1405, 1406, 1407, 1408, 1409, 1410, 1411, 1412, 1603: n = A,T,C or G
  misc_feature 1604, 1605, 1606, 1607, 1608, 1609, 1610, 1611, 1612, 1613,1614, 1615, 1616, 1617, 1618, 1619: n = A,T,C or G
acttcgatcggccgcccggcccactccgcggctctttccaacgctgtaaaaaaggacagaggctgttccctatggcagaaggcaaccacagaaaaaagccacttaaggtgttggaatccctgggcaaagatttcctcactggtgttttggataacttggtggaacaaaatgtactgaactggaaggaagaggaaaaaaagaaatattacgatgctaaaactgaagacaaagttcgggtcatggcagactctatgcaagagaagcaacgtatggcaggacaaatgcttcttcaaaccttttttaacatagaccaaatatcccccaataaaaaagctcatccgaatatggaggctggaccacctgagtcaggagaatctacagatgccctcaagctttgtcctcatgaagaattcctgagactatgtaaagaaagagctgaagagatctatccaataaaggagagaaacaaccgcacacgcctggctctcatcatatgcaatacagagtttgaccatctgcctccgaggaatggagctgactttgacatcacagggatgaaggagctacttgagggtctggactatagtgtagatgtagaagagaatctgacagccagggatatggagtcagcgctgagggcatttgctaccagaccagagcacaagtcctctgacagcacattcttggtactcatgtctcatggcatcctggagggaatctgcggaactgtgcatgatgagaaaaaaccagatgtgctgctttatgacaccatcttccagatattcaacaaccgcaactgcctcagtctgaaggacaaacccaaggtcatcattgtccaggcctgcagaggtgcaaaccgtggggaactgtgggtcagagactctccagcatccttggaagtggcctcttcacagtcatctgagaacctggaggaagatgctgtttacaagacccacgtggagaaggacttcattgctttctgctcttcaacgccacacaacgtgtcctggagagacagcacaatgggctctatcttcatcacacaactcatcacatgcttccagaaatattcttggtgctgccacctagaggaagtatttcggaaggtacagcaatcatttgaaactccaagggccaaagctcaaatgcccaccatagaacgactgtccatgacaagatatttctacctctttcctggcaattgaaaatggaagccacaagcagcccagccctccttaatcaacttcaaggagcaccttcattagtacagcttgcatatttaacattttgtatttcaataaaagtgaagacaaactctagagacgataaannanaaaaaaaaaaaaggggggcccctaaaattttttaaaaaaaaaannnnnnnnnnnnnnnnnnnnnnnnnnnnnnnnnnncccccaaaaaaagaaaaaaggaaaaaagcacccttggggggaaaaaacggggggggggggccctaaattgtcaaaaaaaaaaggacccccaccccagctcccaaaaaaaggagttttcaacccgggcttttttggggggttggcccacaccccccggggtcttataaaaaatttgggccccccgggtaccnnnnnnnnnnnnnnnnn

SEQ ID NO: 13877 - DNA, 850 bp, Homo sapiens
  misc_feature 1, 24, 567, 687, 778, 810, 818, 834, 836, 847, 848, 849, 850: n = A,T,C or G
nactcactataggggcgaattggnagctccaccgcggtggcggccgaggtacgcggggagtgtaagaaggccatctacaatcaagattgagagtggctctaacaagtgccatttttccttgttagctttcatttctcagccctttacaagattaaaatagtctgcagtttaatctctccaaagctttacggacagtgattctgtcctaaacaagacagtgactccaggatttctgaagactattgtggaagaagcatccattaaggccaagctataacatcagaaatggtgaatgaatacaagaaaattcttttgctgaaaggatttgagctcatggatgattatcattttacatcaattaagtccttactggcctatgatttaggactaactacaaaaatgcaagaggaatacaacagaattaagattacagatttgatggaaaaaaagttccaaggcgttgcctgtctagacaaactaatagaacttgccaaagatatgccatcacttaaaaaccttgttaacaatcttcgaaaagagaagtcaaaagttgctaagaaaattaanacacaagaaaaagctccagtgaaaaaaataaaccaggaagaagtgggtcttgcggcacctgcacccaccgcaagaaacaaactgacatcggaagcaagagggaggattcctgtagctcanaaaagaaaactccaaacaaagaaaagctgaagccaaaaggataagggtccaagagcaaagtagcccggtcctcagagcacaatcgcagtgngtatcccatccagctcacacatcatcacatcntaccgatnggaccagcacgaggtnanaatgtccaacnnnn

SEQ ID NO: 13878 - DNA, 825 bp, Homo sapiens
  misc_feature 1, 2, 3, 4, 24, 47, 141, 148, 825: n = A,T,C or G
nnnngccatcgccattcaggctgncaactgttggaagggcgatcgtncgggcttctcgctatacgccagcccagtcacgacgttgtaaacgacggcccagtgaattgtaatacgactcactatagggcgaattgggtaccnggccccncctcgagtctttttttttttttttgtttgaagtttttagtttattaatgttcttgcgaaaaatccacagtggccacagctaacatcattgcagcacctttactccttcggctgtgaatcaagagaaagaagtttagtcaacaactgcctttaaaattctttaaagtcttcaattccaaaagtagtaacactcatgcacaacaattattagtaacctagaatatcaagttattttgatgttatcataacacaatgaaagcatcaagaaataaaatttacaaacattcaagttaagaataaaacaaaaataatgggctaaatattgctaaaccttaaaaacaaaaccatgtcactgttagtattttaaaaggttacaactcttcagaatatttgtaaatctacttctagatgtactacacatgatctgcttttaaattgctacgtcagtacaccaaggagtctagtgatctacatgactacatgaaaagcttgaattatacctgtgatccaatctccagctcactgaatcagtggcggggaagggaaaaagagaaaggagggaaaagaaagatttcattaatagtcccttttcaaactccaaaataatctgcatttaagtgcatgcaatcaggtaccttaaagatgaccatttgtctttgcaattgtatacagagcacn

SEQ ID NO: 13879 - DNA, 611 bp, Homo sapiens
  misc_feature 1, 2, 3, 4: n = A,T,C or G
nnnnggagacagggccttttttgtcaccttggctgagtgcagtggcacaatcagagctcacctcaaccccaagctcctgggcttaatcgatcctcccccatcagcctcccgagtagctaggaccgcaggtgcacaccactacaccaagctaatttttgactttttgtacagatggggtctcactacattgcccaagctgtgccagaattcctggatgcaagcaacccttctgccttggcctcccaaagcgctgggattactagcatgagccaccatacccagacaaagcccttaatttcttacatatccatttaaggccctgattaacccaacacattaaaaggggaaagattaattcacttccccgcgtgagtaaattcaagactgagatgatataatcggtaccacaagtctggcaattctccagttggtctaatccatatgtaatgaccatgtcacaatgtatagtcatgctaggatccaagctgccgagcaaaacacccacacgctcattagcagctgtcaacacagcctcagaaaaaaacacctggtttgcagccgtcacacatctcattactctgtacagaacctgtaatcggacgcgtgggtcg

SEQ ID NO: 13880 - DNA, 3395 bp, Homo sapiens
  misc_feature 1, 2, 3, 4, 5, 3392, 3393, 3394, 3395: n = A,T,C or G
nnnnnatatgtgcccctaatcatgcaaaaccgatctggggggaatcagttgtttcttcaggtcttcgcaggattccagctcccccaactacctccgtcgccttctaaaactggcaggctctggacgttttgcatgctgaagaaaatcactgttttgcctccagcaaggaacataaatgttgcaacactgactcctcctctcatgaagaaagagtgaacaagtgcaccgagttgagcttcttctcacagagccaccgggctggggaccggggagcggaggctgaaatccccagacgccggttttctgggctgggctttctgccttactcactccttctccctctttctggattttaccgaccgttcgcgaaacagctttccacacaatggagcttcatgtcctcgtgcaggaagtactcatcgactgatgtggcagactttgctccctggcaaaactaaagaactctcctattcatggaggcgaacactgaggatgctttccacatgaaccctgaagtgaacttctgatacatttcctgcagcaagagaaggcagccaacatgaaggaaaatgtggcatctgcaaccgttttcactctgctactttttctcaacacctgccttctgaatggacagttacctcctggaaaacctgagatctttaaatgtcgttctcccaataaggaaacattcacctgctggtggaggcctgggacagatggaggacttcctaccaattattcactgacttaccacagggaaggagagacactcatgcatgaatgtccagactacataaccggtggccccaactcctgccactttggcaagcagtacacctccatgtggaggacatacatcatgatggtcaatgccactaaccagatgggaagcagtttctcggatgaactttatgtggacgtgacttacatagttcagccagaccctcctttggagctggctgtggaagtaaaacagccagaagacagaaaaccctacctgtggattaaatggtctccacctaccctgattgacttaaaaactggttggttcacgctcctgtatgaaattcgattaaaacccgagaaagcagctgagtgggagatccattttgctgggcagcaaacagagtttaagattctcagcctacatccaggacagaaataccttgtccaggttcgctgcaaaccagaccatggatactggagtgcatggagtccagcgaccttcattcagatacctagtgacttcaccatgaatgatacaaccgtgtggatctctgtggctgtcctttctgctgtcatctgtttgattattgtctgggcagtggctttgaagggctatagcatggtgacctgcatctttccgccagttcctgggccaaaaataaaaggatttgatgctcatctgttggagaagggcaagtctgaagaactactgagtgccttgggatgccaagactttcctcccacttctgactatgaggacttgctggtggagtatttagaagtagatgatagtgaggaccagcatctaatgtcagtccattcaaaagaacacccaagtcaaggtatgaaacccacatacctggatcctgacactgactcaggccgggggagctgtgacagcccttcccttttgtctgaaaagtgtgaggaaccccaggccaatccctccacattctatgatcctgaggtcattgagaagccagagaatcctgaaacaacccacacctgggacccccagtgcataagcatggaaggcaaaatcccctattttcatgctggtggatccaaatgttcaacatggcccttaccacagcccagccagcacaaccccagatcctcttaccacaatattactgatgtgtgtgagctggctgtgggccctgcaggtgcaccggccactctgttgaatgaagcaggtaaagatgctttaaaatcctctcaaaccattaagtctagagaagagggaaaggcaacccagcagagggaggtagaaagcttccattctgagactgaccaggatacgccctggctgctgccccaggagaaaaccccctttggctccgctaaacccttggattatgtggagattcacaaggtcaacaaagatggtgcattatcattgctaccaaaacagagagagaacagcggcaagcccaagaagcccgggactcctgagaacaataaggagtatgccaaggtgtccggggtcatggataacaacatcctggtgttggtgccagatccacatgctaaaaacgtggcttgctttgaagaatcagccaaagaggccccaccatcacttgaacagaatcaagctgagaaagccctggccaacttcactgcaacatcaagcaagtgcaggctccagctgggtggtttggattacctggatcccgcatgttttacacactcctttcactgatagcttgactaatggaatgattggttaaaatgtgatttttcttcaggtaacactacagagtacgtgaaatgctcaagaatgtagtcagactgacactactaaagctcccagctcctttcatgctccatttttaaccacttgcctctttctccagcagctgattccagaacaaatcattatgtttcctaactgtgatttgtagatttactttttgctgttagttataaaactatgtgttcaatgaaataaaagcacactgcttagtattcttgagggacaatgccaataggtatatcctctggaaaaggctttcatgatttggcatgggacagacggaaatgaaattgtcaaaattgtttaccatagaaagatgacaaaagaaaattttccacataggaaaatgccatgaaaattgcttttgaaaaacaactgcataacctttacactcctcgtccattttattaggattacccaaatataaccatttaaagaaagaatgcattccagaacaaattgtttacataagttcctataccttactgacacattgctgatatgcaagtaagaaataatgcctccaattttttcttaaaatagtttagatatgttaagcatggattttccccctaaattctactctaaagcttctataaaatatagtttggaaataaaaatgttcttacacaaggggcaaatgaatttcatgtgaatccctttaggatgttttcctccttcatttcagcatgatagataatttattatacaccttagtctttccttagttaaaaaaaaattccctaaagactaacttgaaaagaaaaccacagcaggatgctaatggaattactgccttactgtacatacaaattctactttaatataaacccataagtttaactgtatttttgaagactatttttctatgacttaggtaaaataaaagactattttctattttcccagnnnn

SEQ ID NO: 13881 - DNA, 1127 bp, Homo sapiens
cgagaagtcttctagaattaattaacgcgggaggagcagtacaacagcacgtaccgtgtggtcagcgtcctcaccgtcctgcaccaggactggctgaatggcaaggagtacaagtgcaaggtctccaacaaagccctcccagcccccatcgagaaaaccatctccaaagccaaagggcagccccgagaaccacaggtgtacaccctgcccccatcccgggatgagctgaccaagaaccaggtcagcctgacctgcctggtcaaaggcttctatcccagcgacatcgccgtggagtgggagagcaatgggcagccggagaacaactacaagaccacgcctcccgtgctggactccgacggctccttcttcctctacagcaagctcaccgtggacaagagcaggtggcagcaggggaacgtcttctcatgctccgtgatgcatgagggtctgcacaaccactacacgcagaagagcctctccctgtctccgggtaaatgagtgcgacggccggcaagcccccgctccccgggctctcgcggtcgcacgaggatgcttggcacgtaccccgtgtacatacttcccgggcgcccagcatggaaataaagcacccagcgctgccctgggcccctgcaaaaaaaaaaaaaaaaaaaaaaaaaaaaaaaaaaaaaaactcgagggggggcccggtacccaattcgccctatagtgagtcgtattacaattcactggccgtcgttttacaacgtcgtgactgggaaaaccctggcgttacccaacttaatcgccttgcagcacatccccctttcgccagctggcgtaatagcgaagaggcccgcaccgatcggccttcccaacagttgcgcagcctgaatggcgaatggcaaattgtaagcgttaatattttggtaaaattcgcgttaaactcttggtaaatcagctcattttttaaccaataggccgaaaatggcaaaatcccttataatcaaaagaatgaccgagatagggttgagtgttgttcccagcttgaaccaggagtccactattaaagaccgtggacctcaacgtcaaagggcgaatttgggtcgaggtgcctaaaggactaatcggaaccctaaagggaggccccg

SEQ ID NO: 13882 - DNA, 1907 bp, Homo sapiens
tccgtatgtataacttttctctttattaagaaccctacattgattctgagtgttacttcttcccacactcattaccatgtactctgccttatttccccccagagtttgatgctccaagccctctcccagagactacagagaatgtggtgtgtgccctgggcctgactgtgggtctggtgggcatcattattgggaccatcttcatcatcaagggagtgcgcaaaagcaatgcagcagaacgcagggggcctctgtaaggcacatggaggtgagttaggtgtggtcagaggaagacatatatggagatatctgagggaggaaaacagggtggggaaagaaaatgtaatgcatttaagagacaaggtaggaacagatgtggctcttgatttctctttgctagaacgaatcagacattggtatcatctggtatcccaaagcttcagggtctgtcatccctttctatagacgggcaccttgatcacggctccagtcttagaaatcatctccagtacctaaaaccattgtttcacattagaatactgagtctagggatctagaaaatactgagtctagggatctagaaaaataagcctcaagatttgggcacatcctagcttgtatttcctggggcaggtcatcagttcagaagcatttccagatcctggctcctttcaggttagggtcaattcattgcatgaaatgggaatctcttagagcccaatgcctgcttttgcttctttagtctcaaatgtagtatgagaaactctaaaaaaaggtaaagcatggttgcttattatgttcagttggagagtaggaactaactgtatacagttagttcatgttggaaaggttagatgaacattgaaagaattttgcaaagtcaaaggattaagagagaagaggaaggaatctcaagcaaggagctcaaaacggatcttaaattccttggtaactatgtgtgtcttgctataggtgatggtgtttcttagagagaagatcactgaagaaacttctgctttaatgactttacaaagctggcaatattacaatccttgacctcagtgaaagcagtcatcttcagcgttttccagccctatagccaccccaagtgtggttatggtgtttcttagagagaagatcactgaagaaacttctgctttaatggctttacaaagctggcaatattacaatccttgacctcagtgaaagcagtcatcttcagcattttccagccctatagccaccccaagagtggttatgcctcctcgattgctccatactctaacatctagctggcttccctgtctattgccttttcctgtatctattttcctctatttcctatcattttattatcaccatgcaatgcctctggaataaaacatacaggagtctgtctctgctatggaatgccccatggggcatctcttgtgtacttattgtttaaggtttcctcaaactgtgatttttctgaacacaataaactattttgaagatcaaggaggaaacaaaggattaaatttaattcatgtcggccgcctcggcccagtcgactctagactcgagcaagcttatgcatgcggccgcaattcgagctcacttggccaattcgccctatagtgagtcgtattacaattcactggccgtcgttttacaacgtcgtgactgggaaaaccctggcgttacccaacttaatcgccttgcagcacatccccctttcgccagctggcgtaatagcgaagaggcccgcacggatcgcccttcccaacagttgcgcagcctgaatggcgatggaattgtaagcgttaatattttgttaaaattcgcgttaaatttttgttaaatcagctcattttttaaccaataggccgaaatcggcaaaatcccttataatcctattaaagaac

SEQ ID NO: 13883 - DNA, 1125 bp, Homo sapiens
cctatgtcccagtttttctggaatggtccagggtccactggaatgttccagtgttccatctggttagagctctctttcattccttttggctactagtaaatcccaaattgcatatgaggttcccatggctgaggaggcagagggcgggcctgtgccatgtcccaagccacaagggaacaggcctgtgggcttttcccaacaagcaggctcagtgccagcctctgtgtcagcctccagggcacgccaaccttctcatggtgccccaagccccaccccaatgcacacataggaagtctccaggctgcttgggcagaggcacaatcattttagataaaaaaaaattgaacaaagagaccctcttgcgagaggtgagatgaggccctgccatgcaaaggagtcccagcagaggaggaagaattccatcctggagttcaagtttctgtgcagagacaggacctggggacagagaacggtcctccacccaatttcagctggtctgtcctcatcagctttgggctgagcctggggtgatgagaggtggagtctcccctggatggtgaccggacttctggccaaacttgcatttgcattttgcactcatgacgatgatgatgcccatggcgcacagaaccccagcgcagatgagcccgccaacctggaggctgtgccagtctaggaggaaagtggaggggacctcagtgccagcctgtgtcctcttcatctgtccccccattctcttgacaaatatatatggagcaccatagtagaaaggactgtttttatcttctaggtcattggcgtccaggacaggaaagcctgccaggaacacaagcaggcccagggtcaccttctgcatgtcagagcgctggcccgggacaggaaggctggcatctcgctgggctgagagataagccgcagctgcaccgtggagtggggactgggtgaaactcgggcctgtgtggttcaccaggctgagcagaggttccgggagaaatcgggctgccaggcggagtcctgcgtttatccgaagctgccacgccctaagcaaacctcacttcttttccttagatgatgtgttttgcctggtggaaggattgctggcagttgtggagaacttaaagtccc

SEQ ID NO: 13884 - DNA, 914 bp, Homo sapiens
  misc_feature 1, 2, 3, 4, 5, 6, 7, 8, 9, 10, 11, 12, 13, 14, 15, 16, 17,18, 19, 20, 21, 22, 23, 24, 25, 26, 27, 28, 29, 30, 913,914: n = A,T,C or G
nnnnnnnnnnnnnnnnnnnnnnnnnnnnnntaaaagtttttatttcaaaaaataaagctgcagttcatttcacataaatatctggggagggaaggggagtgggatggggtgggggcttggcccctacctcctcttctctttcacactgtattgtaaaagcaaaggggatggcttgccgaaccagcgggagagccatatctgcttcattgtcatgtgatcagggagaacttcattgtcaaaaaggagctgcacatgctgagggtttagcatcaagcggtgacacaggaccctccggagatggcgtacctcagctctaacagaacatcggacatacttgttctgcaggacgcttttattcttgtctttgccagaactcagccgctccaggcacaggttcaactgctcatcatagcgatagtagtgggctttagagtggtcaaagctgctgaaggggaggccgaggttgctcagtgctggctcttccccagtgggctgggtgacccggtccaaacctcgggactggtagaattcccgaatccgtttctcttcactgtcttgcaagccaggcaccagcttatacacgatgtcctgcatgacccggtccagtttgaggttgagcagtggctgtgtctcgtggatcttaatgttgcacatggggcagtacttgctagtttggaggtacttcacaatacaactcttgcagaaagtatgaagacactctgtgatggtggtggcatccacgaagtagccggcgcataggcagcaaacaatgtgttcattcaagtctttgatcttcactcgaacctcctcctcgttccgtagcgggtccatcttgtacactgactggagctggttccgaagcctcatcgcgatcgcaatctggcccccctgaggagactcgtgccgaaaggcnn

SEQ ID NO: 13885 - DNA, 1679 bp, Homo sapiens
  misc_feature 1653, 1654, 1655, 1656, 1657, 1658, 1659, 1660, 1661, 1662,1663, 1664, 1665, 1666, 1667, 1668, 1669, 1670, 1671, 1672,1673, 1674, 1675, 1676, 1677, 1678, 1679: n = A,T,C or G
gagtcgacccacgcgtccgggacgctggcggctccgcgacgagctttgttttttcggttgggcatgctgcttaccgcaggatgatggaagcgacggcccgtacaaagacagaagcgttggtttcactgagtcagtgctgattctctcaaatagagcttgaaggataaatcttcatttttgtttcaacaaaacttcgaaacaaaatggaagaaaataatctacagtgcagtagtgtggttgacggtaattttgaagaagttcccagggagacggcaattcagtttaaacctccactatacagacagcggtaccagttcgttaaaaatttagtggatcaacatgagcctaagaaggttgcagacctgggatgtggtgatacttcactcttaaggctgctaaaagtcaatccatgcattgaattgcttgttggagtagatattaatgaggataaattacgatggagaggggattcgttagctcctttcctgggggattttctgaaacctcgggatctgaatttgaccatcacattgtatcatggctccgttgtggagagagactctcgtttgcttggatttgacttgataacgtgtattgaattaatagaacatttggattcaggtgatctggccagatttcctgaagtggtatttgggtacctgtctccatccatgattgtcatcagcacaccaaactctgaattcaatcccctgtttccatcagtgaccttaagagattcagatcataaatttgagtggaccagaatggagtttcagacctgggctttatatgtggcaaatcgctatgattactctgtggagtttactggtgtcggggaaccaccagctggagctgagaatgttggatactgtacccagataggaatcttccggaaaaatggaggaaaggcaacagaatcatgtctttcagagcagcatgatcagcatgtttataaagctgtttttaccacctcatacccaagcttacagcaggaaaggttctttaaacttgtgttggttaatgaggtgtcccaacaagtggaaagcttaagagtgagccacctgccaaggcggaaagaacaggctggggaacggggtgataagcccaaagacattggtggctcaaaggcccctgtcccatgctttggaccagtcttcacagaggttgagaaggccaagatagagaactctcccacacccttctgtgttggagataaatttttcgtacctctgcagagactccttgcgtatcccaagttgaaccgcttatgtgctaatgaagagatgatgagatcagtcattgctgactcaattcctctgagcagtgatggttctgcagtggtggctgacctgcgtaattattttgatgaacagtttgagttttgaaccatgtttatttcctgaaatttcagggtctcagcgatagttgtgctcacttagaatttagttttttttgtgtaatcctaattcaagtaatgtttttaaagtttcactgcaaaagtctatgttccaagccattggacagacctgcttgagatatggccagactgcagtgagccctgagaaagatatgagggtttaaaacgggtgctttcctttgattttggacttttttgttttctcaagaataaagaagttggatgtggtaatatgnnnnnnnnnnnnnnnnnnnnnnnnnnn

SEQ ID NO: 13886 - DNA, 3600 bp, Homo sapiens
  misc_feature 1, 3580, 3581, 3582, 3583, 3584, 3585, 3586, 3587, 3588,3589, 3590, 3591, 3592, 3593, 3594, 3595, 3596, 3597, 3598,3599, 3600: n = A,T,C or G
nactatagggagtccgccccacgcgtccggctgcgagaacctttgcacgcgcacaaactacggggacgatttctgattgatttttggcgctttcgatccaccctcctcccttctcatgggactttggggacaaagcgtcccgaccgcctcgagcgctcgagcagggcgctatccaggagccaggacagcgtcgggaaccagaccatggctcctggactccaagatccttaagttcgtcgtcttcatcgtcgcggttctgctgccggtccgggttgactctgccaccatcccccggcaggacgaagttccccagcagacagtggccccacagcaacagaggcgcagcctcaaggaggaggagtgtccagcaggatctcatagatcagaatatactggagcctgtaacccgtgcacagagggtgtggattacaccattgcttccaacaatttgccttcttgcctgctatgtacagtttgtaaatcaggtcaaacaaataaaagttcctgtaccacgaccagagacaccgtgtgtcagtgtgaaaaaggaagcttccaggataaaaactcccctgagatgtgccggacgtgtagaacagggtgtcccagagggatggtcaaggtcagtaattgtacgccccggagtgacatcaagtgcaaaaatgaatcagctgccagttccactgggaaaaccccagcagcggaggagacagtgaccaccatcctggggatgcttgcctctccctatcactaccttatcatcatagtggttttagtcatcattttagctgtggttgtggttggcttttcatgtcggaagaaattcatttcttacctcaaaggcatctgctcaggtggtggaggaggtcccgaacgtgtgcacagagtccttttccggcggcgttcatgtccttcacgagttcctggggcggaggacaatgcccgcaacgagaccctgagtaacagatacttgcagcccacccaggtctctgagcaggaaatccaaggtcaggagctggcagagctaacaggtgtgactgtagagtcgccagaggagccacagcgtctgctggaacaggcagaagctgaagggtgtcagaggaggaggctgctggttccagtgaatgacgctgactccgctgacatcagcaccttgctggatgcctcggcaacactggaagaaggacatgcaaaggaaacaattcaggaccaactggtgggctccgaaaagctcttttatgaagaagatgaggcaggctctgctacgtcctgcctgtgaaagaatctcttcaggaaaccagagcttccctcatttaccttttctcctacaaagggaagcagcctggaagaaacagtccagtacttgacccatgccccaacaaactctactatccaatatggggcagcttaccaatggtcctagaactttgttaacgcacttggagtaatttttatgaaatactgcgtgtgataagcaaacgggagaaatttatatcagattcttggctgcatagttatacgattgtgtattaagggtcgttttaggccacatgcggtggctcatgcctgtaatcccagcactttgataggctgaggcaggtggattgcttgagctcgggagtttgagaccagcctcatcaacacagtgaaactccatctcaatttaaaaagaaaaaaagtggttttaggatgtcattctttgcagttcttcatcatgagacaagtctttttttctgcttcttatattgcaagctccatctctactggtgtgtgcatttaatgacatctaactacagatgccgcacagccacaatgctttgccttatagttttttaactttagaacgggattatcttgttattacctgtattttcagtttcggatatttttgacttaatgatgagattatcaagacgtagccctatgctaagtcatgagcatatggacttacgagggttcgacttagagttttgagctttaagataggattattggggcttacccccaccttaattagagaaacatttatattgcttactactgtaggctgtacatctcttttccgatttttgtataatgatgtaaacatggaaaaactttaggaaatgcacttattaggctgtttacatgggttgcctggatacaaatcagcagtcaaaaatgactaaaaatataactagtgacggagggagaaatcctccctctgtgggaggcacttactgcattccagttctccctcctgcgccctgagactggaccagggtttgatggctggcagcttctcaaggggcagcttgtcttacttgttaattttagaggtatatagccatatttatttataaataaatatttatttatttatttataagtagatgtttacatatgcccaggattttgaagagcctggtatctttgggaagccatgtgtctggtttgtcgtgctgggacagtcatgggactgcatcttccgacttgtccacagcagatgaggacagtgagaattaagttagatccgagactgcgaagagcttctctttcaagcgccattacagttgaacgttagtgaatcttgagcctcatttgggctcagggcagagcaggtgtttatctgccccggcatctgccatggcatcaagagggaagagtggacggtgcttgggaatggtgtgaaatggttgccgactcaggcatggatgggcccctctcgcttctggtggtctgtgaactgagtccctgggatgccttttagggcagagattcctgagctgcgttttagggtacagattccctgtttgaggagcttggcccctctgtaagcatctgactcatctcagagatatcaattcttaaacactgtgacaacgggatctaaaatggctgacacatttgtccttgtgtcacgttccattattttatttaaaaacctcagtaatcgttttagcttctttccagcaaactcttctccacagtagcccagtcgtggtaggataaattacggatatagtcattctaggggtttcagtcttttccatctcaaggcattgtgtgttttgttccgggactggtttggctgggacaaagttagaactgcctgaagttcgcacattcagattgttgtgtccatggagttttaggaggggatggcctttccggtcttcgcacttccatcctctcccacttccatctggcgtcccacaccttgtcccctgcacttctggatgacacagggtgctgctgcctcctagtctttgcctttgctgggccttctgtgcaggagacttggtctcaaagctcagagagagccagtccggtcccagctcctttgtcccttcctcagaggccttccttgaagatgcatctagactaccagccttatcagtgtttaagcttattcctttaacataagcttcctgacaacatgaaattgttggggttttttggcgttggttgatttgtttaggttttgctttatacccgggccaaatagcacataacacctggttatatatgaaatactcatatgtttatgaccaaaataaatatgaaacctcatattaaaaaaaaaaaaaaaaaagggcggccnnnnnnnnnnnnnnnnnnnnn

SEQ ID NO: 13887 - DNA, 871 bp, Homo sapiens
  misc_feature 1, 2, 3, 4, 5, 6, 7, 8, 9, 10, 11, 12, 871: n = A,T,C or G
nnnnnnnnnnnngcgaaagtcttctagaggccaagaaacgccgggagtagccgaaggggacgccgggaacaggaatttcttcacatggctcctggagaagtgaccatcacagttcgcctcatccgttcctttgaacatcgcaatttcaaacctgtagtgtatcacggagtgaatttggaccaaactgtaaaggaatttatcgtatttctaaagcaagatgtccctttaaggaccaacctgccaccaccattcagaaattataaatatgatgcactaaagattattcatcaagcacataaatcaaagacaaatgaacttgtgttgagtttggaagatgacgaaagactcctgctgaaagaagacagcactctgaaagcagctggaatcgccagtgaaactgaaattgcattcttctgtgaagaagattataggaactacaaagctaatcccatttcatcctggtgaaaacatctcgagggcttcctttttgcatacctgtattaagctctttattccactgctgagtttttgaaattgacaaacaaatcttaaaaaattaatcccaggctatactctttgagctaaaatctggttatttctttctcttcaggtctttctttccttctctctttctttttctttgttgttgtaaaataatatattatgagaaaaacatttgatctttttaaagggaaataaattgttataaaaaagaaagaaaggaaaaaaaaatttgtgggggcgggcccggaaaagttttaacaaccggttgggggcggccaggattgaaatgggtaggccaggaaacgggagaggggggttcccataaagggggggggggtgaaacaggggtggggtgggtaaggcggan

SEQ ID NO: 13888 - DNA, 5396 bp, Homo sapiens
aacgcgcttcaccgtattactgtcctcccagatgtctccctcttcttacactcctcattgtcccttctacctcactaacctgtgtctacatagtctgattccaatatgccagggtaccagtggcatgacattgtttttcctcatagaaatttgccatagtctctcctccattatttggttggttacagcctcataaaggaagacaggagttgcttctttctgcaagaaagaaggttaaaaactataaatatttcccccaaatggccagggtattattttattgcatcacattgtttgcatcttaagatctagaatctttgctgctctcttccaggcccttggtgattaacagaaaggaaatgaccttgtacatttgctcatagggtatttctggccctcctggtccccctggtcctgctgggaaagaagggcttcgtggtcctcgtggtgaccaaggtccagttggccgaactggagaagtaggtgcagttggtccccctggcttcgctggtgagaagggtccctctggagaggctggtactgctggacctcctggcactccaggtcctcagggtcttcttggtgctcctggtattctgggtctccctggctcgagaggtgaacgtggtctaccaggtgttgctggtgctgtgggtgaacctggtcctcttggcattgccggccctcctggggcccgtggtcctcctggtgctgtgggtagtcctggagtcaacggtgctcctggtgaagctggtcgtgatggcaaccctgggaacgatggtcccccaggtcgcgatggtcaacccggacacaagggagagcgcggttaccctggcaatattggtcccgttggtgctgcaggtgcacctggtcctcatggccccgtgggtcctgctggcaaacatggaaaccgtggtgaaactggtccttctggtcctgttggtcctgctggggctgttgggccaagaggtcctagtggcccacaaggcattcgtggcgataagggagagcccggtgaaaaaggggcccagaggtcttcctggcttaaagggacacaatggattgcaaggtctgcctggtatcgctgtaagtaaactgtagccatctcgcacataaactgatcctgaaggccttcagctcagaaggattttcatattttcactgctattgttccagtatagcctatataatatccatttcccattctctggctaactccatctcactcttggaggtaatgctatttcataccaacatgaaaggtgaggattaagggagatagaaatagacatacaataaaatctcctggtaacaatgtccttcaaccccacttaaaataaacataattagaggaatgactaatattgcactgctgaaataggttgtgaaaaaaaaattgaatataatagacataatgggagaaaagagccccactttacattttcaattttctcaatccggagtccatttaactaaagtttcccattgaatatggaaaaaaaaaaaatatgtctcttgacatgtgctctgaaagtgtgattttcctcttctgtctttaaagggtcaccatggtgatcaaggtgctcctggctccgtgggtcctgctggtcctagggtaggtggactcaagagaagacagttcatctctgaaatagaggctaaagcgagcagtgagccccaggctgctgctcccttggtgggattcaccagctcacatgtacctggtgtctgtcttccttagggccctgctggtccttctggccctgctggaaaagatggtcgcactggacatcctggtacagttggacctgctggcattcgaggccctcagggtcaccaaggccctgctgtaagtatgatttggggaaataataaagaagatcacggacctaaggaatgttttcttcagactaaaccaagacaactttgacaacccattaaagttagccccatttcaatatatcctctaaaatatctggaaattgtctatatgcaatgggcttgttaagtccatccctgcaagtgtgcctgggggctcgttatttatttatgtgaacttgattattttttactgatgagaacatgcttccgtgtgaagctcaactgaaaatctgctgccatggatgtctctcactgtaacaaaatataaagcctctcctatctcactttcacctttgcagggcccccctggtccccctggccctcctggacctccaggtgtaagcggtggtggttatgactttggttacgatggagacttctacagggctgaccagcctcgctcagcaccttctctcagacccaaggactatgaagttgatgctactctgaagtctctcaacaaccagattgagacccttcttactcctgaaggctctagaaagaacccagctcgcacatgccgtgacttgagactcagccacccagagtggagcagtggttactactggattgaccctaaccaaggatgcactatggatgctatcaaagtatactgtgatttctctactggcgaaacctgtatccgggcccaacctgaaaacatcccagccaagaactggtataggagctccaaggacaagaaacacgtctggctaggagaaactatcaatgctggcagccagtttgaatataatgtagaaggagtgacttccaaggaaatggctacccaacttgccttcatgcgcctgctggccaactatgcctctcagaacatcacctaccactgcaagaacagcattgcatacatggatgaggagactggcaacctgaaaaaggctgtcattctacagggctctaatgatgttgaacttgtttgctgagggcaacagcaggttcacttacactgctcttgtagatggctgctctaaaaagacaaatgaatggggaaagacaatcattgaatacaaaacaaataagccatcacgcctgcccttccttgatattgcacctttggacatcggtggtgctgaccaggaattctttgtggacattgccagtctgtaacaaataaatgaactcaatctaaattaaaaaagaaagaaatttgaaaaaactttctctttgccatttcttcttcttcttttttaactgaaagctgaatccttccatttcttctgcacatctacttgcttaaattgtgggcaaaagagaaaaagaaggattgatcagagcattgtgcaatacagtttcattaactccttcccccgctcccccaaaaatttgaatttttttttcaacactcttacacctgttatggaaaatgtcaacctttgtaagaaaaccaaaataaaaattgaaaaataaaaaccataaacatttgcaccacttgtggcttttgaatatcttccacagagggaagtttaaaacccaaacttccaaaggtttaaactacctcaaaacactttcccatgagtgtgatccacattgttaggtgctgacctagacagagatgaactgaggtccttgttttgttttgttcataatacaaaggtgctaattaatagtatttcagatacttgaagaatgttgatggtgctagaagaatttgagaagaaatactcctgtattgagttgtatcgtgtggtgtattttttaaaaaatttgatttagcattcatattttccatcttattcccaattaaaagtatgcagattattaattagcacctttgtattatgaacaaaacaaaacaaggacctcagttcatctctgtctaggtcagcacctaacaatgtggatcacactcatgggaaagtgttttgaggtagtttaaacctttggaagtttgggttttaaaacttccctctgtggaagatattcaaaagccacaagtggtgcaaatgtttatggtttttatttttcaatttttattttggttttcttacaaaggttgacattttccataacaggtgtaagagtgttgaaaaaaaaattcaaatttttgggggagcgagggaaggagttaatgaaactgtattgcacaatgctctgatcaatccttctttttctcttttgcccacaatttaagcaagtagatgtgcagaagaaatggaaggattcagctttcagttaaaaaagaagaagaagaaatggcaaagagaaagttttttcaaatttctttcttttttaatttagattgagttcatttatttgaaacagactgggccaatgtccacaaagaattcctggctcagcaccttctctcagacccaaggactatgaagttgatgctactctgaagtctctcaacaaccagattgagacccttcttactcctgaaggctctagaaagaacccagctcgcacatgccgtgacttgagactcagccacccagagtggagcagtggttactactggattgaccctaaccaaggatgcactatggatgctatcaaagtatactgtgatttctctactggcgaaacctgtatccgggcccaacctgaaaacatcccagccaagaactggtataggagctccaaggacaagaaacacgtctggctaggagaaactatcaatgctggcagccagtttgaatataatgtagaaggagtgacttccaaggaaatggctacccaacttgccttcatgcgcctgctggccaactatgcctctcagaacatcacctaccactgcaagaacagcattgcatacatggatgaggagactggcaacctgaaaaaggctgtcattctacagggctctaatgatgttgaacttgttgctgagggcaacagcaggttcacttacactgttcttgtagatggctgctctaaaaagacaaatgaatggggaaagacaatcattgaatacaaaacaaataagccatcacgcctgcccttccttgatattgcacctttggacatcggtggtgctgaccaggaattctttgtggacattggcccagtctgtttcaaataaatgaactcaatctaaattaaaaaagaaagaaatttgaaaaaactttctctttgccatttcttcttcttcttttttaactgaaagctgaatccttccatttcttctgcacatctacttgcttaaattgtgggcaaaagagaaaaagaaggattgatcagagcattgtgcaatacagtttcattaactccttcccccgctcccccaaaaatttgaattttttttttcaacactcttacacctgttatggaaaatgtcaacctttgtaagaaaaccaaaataaaaattgaaaaataaaaaccataaacatttgcaaaaaaaaaaaaaaaagggcggccgccctttttttttttttttttttttttttttttttttttttgagacctgtggagttaagcaagacttttaaaaattggcaccatatacatctagttagttcctttactcttatttttttaaataaaagtagtacaca

SEQ ID NO: 13889 - DNA, 835 bp, Homo sapiens
  misc_feature 798, 826, 827, 828, 829, 830, 831, 832, 833, 834, 835: n = A,T,C or G
aggcgggggggaatagcgtcatcagttctataagagagcgtgtgccgaaggcacgcggggctttcacattcgggaagcgtcgggattaggtgaaagaagctgagctgaacacattacgatggatgatggaaacataagactatcaagaaatccaagtggtaatgggcgaagtttattcagcatccggcaatggacttatcgtagttggggaaacgggtgttccgaataatatcctggaagttatcaggacacctattttaaatataggcctgaattttgtaaagtaatatttaaggtggtccgtgataattaaataaaatgcttaattcatgtggctaaaaaaaaaaaaaaaaaaaaaaaaaaaaaacctgtcggccgcctgggcccagtcgactctagactcgagcaagcttatgcatgcggccgcaattcgagctcacttggccaattcgccctatagtgagtcgtattacaattcactggccgtcgttttacaacgtcgtgactgggaaaaccctggcgttacccaacttaatcgccttgcagcacatccccctttcgccagctggcgtaatagcgaagaggcccgcaccgatcgcccttccaacagttgcgcagcctgaatggcgaatggaaattgtaagcgttaatattttggtaaaattcgcgttaaatttttgttaaatcagctcattttttacccaataggccgaaatcggcaaaatcccttataaatcaaaagaatagaccgagatagggttgaagtgtgttccagtttggaacaagagtccactattnaagcgtggacttccacgtaggcgaccgnnnnnnnnnn

SEQ ID NO: 13890 - DNA, 6545 bp, Homo sapiens
cacgaaggcacacagtactctcagcttgttggtggaagcccctcatctgccttcattctgaaggcagggcccggcagaggaaggatcagagggtcgcggccggagggtcccggccggtggggccaactcagagggagaggaaagggctagagacacgaagaacgcaaaccatcaaatttagaagaaaaagccctttgactttttccccctctccctccccaatggctgtgtagcaaacatccctggcgataccttggaaaggacgaagttggtctgcagtcgcaatttcgtgggttgagttcacagttgtgagtgcggggctcggagatggagccgtggtcctctaggtggaaaacgaaacggtggctctgggatttcaccgtaacaaccctcgcattgaccttcctcttccaagctagagaggtcagaggagttgctccagttgatgtactaaaagcactagattttcacaattctccagagggaatatcaaaaacaacgggattttgcacaaacagaaagaattctaaaggctcagatactgcttacagagtttcaaagcaagcacaactcagtgccccaacaaaacagttatttccaggtggaactttcccagaagacttttcaatactatttacagtaaaaccaaaaaaaggaattcagtctttccttttatctatatataatgagcatggtattcagcaaattggtgttgaggttgggagatcacctgtttttctgtttgaagaccacactggaaaacctgccccagaagactatcccctcttcagaactgttaacatcgctgacgggaagtggcatcgggtagcaatcagcgtggagaagaaaactgtgacaatgattgttgattgtaagaagaaaaccacgaaaccacttgatagaagtgagagagcaattgttgataccaatggaatcacggtttttggaacaaggattttggatgaagaagtttttgagggggacattcagcagtttttgatcacaggtgatcccaaggcagcatatgactactgtgagcattatagtccagactgtgactcttcagcacccaaggctgctcaagctcaggaacctcagatagatgagtatgcaccagaggatataatcgaatatgactatgagtatggggaagcagagtataaagaggctgaaagtgtaacagagggacccactgtaactgaggagacaatagcacagacggaggcaaacatcgttgatgattttcaagaatacaactatggaacaatggaaagttaccagacagaagctcctaggcatgtttctgggacaaatgagccaaatccagttgaagaaatatttactgaagaatatctaacgggagaggattatgattcccagaggaaaaattctgaggatacactatatgaaaacaaagaaatagacggcagggattctgatcttctggtagatggagatttaggcgaatatgatttttatgaatataaagaatatgaagataaaccaacaagcccccctaatgaagaatttggtccaggtgtaccagcagaaactgatattacagaaacaagcataaatggccatggtgcatatggagagaaaggacagaaaggagaaccagcagtggttgagcctggtatgcttgtcgaaggaccaccaggaccagcaggacctgcaggtattatgggtcctccaggtctacaaggccccactggaccccctggtgaccctggcgataggggccccccaggacgtcctggcttaccaggggctgatggtctacctggtcctcctggtactatgttgatgttaccgttccgttatggtggtgatggttccaaaggaccaaccatctctgctcaggaagctcaggctcaagctattcttcagcaggctcggattgctctgagaggcccacctggcccaatgggtctaactggaagaccaggtcctgtgggggggcctggttcatctggggccaaaggtgagagtggtgatccaggtcctcagggccctcgaggcgtccagggtccccctggtccaacgggaaaacctggaaaaaggggtcgtccaggtgcagatggaggaagaggaatgccaggagaacctggggcaaagggagatcgagggtttgatggacttccgggtctgccaggtgacaaaggtcacaggggtgaacgaggtcctcaaggtcctccaggtcctcctggtgatgatggaatgaggggagaagatggagaaattggaccaagaggtcttccaggtgaagctggcccacgaggtttgctgggtccaaggggaactccaggagctccagggcagcctggtatggcaggtgtagatggccccccaggaccaaaagggaacatgggtccccaaggggagcctgggcctccaggtcaacaagggaatccaggacctcagggtcttcctggtccacaaggtccaattggtcctcctggtgaaaaaggaccacaaggaaaaccaggacttgctggacttcctggtgctgatgggcctcctggtcatcctgggaaagaaggccagtctggagaaaagggggctctgggtccccctggtccacaaggtcctattggatacccgggcccccggggagtaaagggagcagatggtgtcagaggtctcaagggatctaaaggtgaaaagggtgaagatggttttccaggattcaaaggtgacatgggtctaaaaggtgacagaggagaagttggtcaaattggcccaagaggggaagatggccctgaaggacccaaaggtcgagcaggcccaactggagacccaggtccttcaggtcaagcaggagaaaagggaaaacttggagttccaggattaccaggatatccaggaagacaaggtccaaagggttccactggattccctgggtttccaggtgccaatggagagaaaggtgcacggggagtagctggcaaaccaggccctcggggtcagcgtggtccaacgggtcctcgaggttcaagaggtgcaagaggtcccactgggaaacctgggccaaagggcacttcaggtggcgatggccctcctggccctccaggtgaaagaggtcctcaaggacctcagggtccagttggattccctggaccaaaaggccctcctggaccacctgggaaggatgggctgccaggacaccctgggcaacgtggggagactggatttcaaggcaagaccggccctcctgggccagggggagtggttggaccacagggaccaaccggtgagactggtccaataggggaacgtgggcatcctggccctcctggccctcctggtgagcaaggtcttcctggtgctgcaggaaaagaaggtgcaaagggtgatccaggtcctcaaggtatctcagggaaagatggaccagcaggattacgtggtttcccaggggaaagaggtcttcctggagctcagggtgcacctggactgaaaggaggggaaggtccccagggcccaccaggtccagttggctcaccaggagaacgtgggtcagcaggtacagctggcccaattggtttaccagggcgcccgggacctcagggtcctcctggtccagctggagagaaaggtgctcctggagaaaaaggtccccaagggcctgcagggagagatggagttcaaggtcctgttggtctcccagggccagctggtcctgccggctcccctggggaagacggagacaagggtgaaattggtgagccgggacaaaaaggcagcaagggtgacaagggagaaaatggccctcccggtcccccaggtcttcaaggaccagttggtgcccctggaattgctggaggtgatggtgaaccaggtcctagaggacagcaggggatgtttgggcaaaaaggtgatgagggtgccagaggcttccctggacctcctggtccaataggtcttcagggtctgccaggcccacctggtgaaaaaggtgaaaatggggatgttggtcccatggggccacctggtcctccaggcccaagaggccctcaaggtcccaatggagctgatggaccacaaggacccccagggtctgttggttcagttggtggtgttggagaaaagggtgaacctggagaagcagggaacccagggcctcctggggaagcaggtgtaggcggtcccaaaggagaaagaggagagaaaggggaagctggtccacctggagctgctggacctccaggtgccaaggggccaccaggtgatgatggccctaagggtaacccgggtcctgttggttttcctggagatcctggtcctcctggggaacctggccctgcaggtcaagatggtgttggtggtgacaagggtgaagatggagatcctggtcaaccgggtcctcctggcccatctggtgaggctggcccaccaggtcctcctggaaaacgaggtcctcctggagctgcaggtgcagagggaagacaaggtgaaaaaggtgctaagggggaagcaggtgcagaaggtcctcctggaaaaaccggcccagtcggtcctcagggacctgcaggaaagcctggtccagaaggtcttcggggcatccctggtcctgtgggagaacaaggtctccctggagctgcaggccaagatggaccacctggtcctatgggacctcctggcttacctggtctcaaaggtgaccctggctccaagggtgaaaagggacatcctggtttaattggcctgattggtcctccaggagaacaaggggaaaaaggtgaccgagggctccctggaactcaaggatctccaggagcaaaaggggatgggggaattcctggtcctgctggtcccttaggtccacctggtcctccaggcttaccaggtcctcaaggcccaaagggtaacaaaggctctactggacccgctggccagaaaggtgacagtggtcttccagggcctcctgggcctccaggtccacctggtgaagtcattcagcctttaccaatcttgtcctccaaaaaaacgagaagacatactgaaggcatgcaagcagatgcagatgataatattcttgattactcggatggaatggaagaaatatttggttccctcaattccctgaaacaagacatcgagcatatgaaatttccaatgggtactcagaccaatccagcccgaacttgtaaagacctgcaactcagccatcctgacttcccagatggtgaatattggattgatcctaaccaaggttgctcaggagattccttcaaagtttactgtaatttcacatctggtggtgagacttgcatttatccagacaaaaaatctgagggagtaagaatttcatcatggccaaaggagaaaccaggaagttggtttagtgaatttaagaggggaaaactgctttcatacttagatgttgaaggaaattccatcaatatggtgcaaatgacattcctgaaacttctgactgcctctgctcggcaaaatttcacctaccactgtcatcagtcagcagcctggtatgatgtgtcatcaggaagttatgacaaagcacttcgcttcctgggatcaaatgatgaggagatgtcctatgacaataatccttttatcaaaacactgtatgatggttgtgcgtccagaaaaggctatgaaaagactgtcattgaaatcaatacaccaaaaattgatcaagtacctattgttgatgtcatgatcaatgactttggtgatcagaatcagaagttcggatttgaagttggtcctgtttgttttcttggctaagattaagacaaagaacatatcaaatcaacagaaaatataccttggtgccaccaacccattttgtgccacatgcaagttttgaataaggatggtatagaaaacaacgctgcatatacaggtaccatttaggaaataccgatgcctttgtgggggcagaatcacatggcaaaagctttgaaaatcataaagatataagttggtgtggctaagatggaaacagggctgattcttgattcccaattctcaactctccttttcctatttgaatttctttggtgctgtagaaaacaaaaaaagaaaaatatatattcataaaaaatatggtgctcattctcatccatccaggatgtactaaaacagtgtgtttaataaattgtaattattttgtgtacagttctatactgttatctgtgtccatttccaaaacttgcacgtgtccctgaattccatctgactctaattttatgagaattgcagaactctgatggcaataaatatatgtattatgaaaaaataaagttgtaatttctgatgactctaagtccctttctttggttaataataaaatgcctttgtatatattgatgttgaagagttcaattatttgatgtcgccaacaaaattctcagagggcaaaaatctggaagacttttggaagcacactctgatcaactcttctctgccgacagtcattttgctgaatttcagccaaaaatattatgcattttgatgctttattcaaggctatacctcaaactttttcttctcagaatccaggatttcacaggatacttgta

SEQ ID NO: 13891 - DNA, 440 bp, Homo sapiens
  misc_feature 1: n = A,T,C or G
ngatttgtgtctgaattattcagacatctaactttgtagttgagctcatttcacaaatgtgaaatggcatgggaatttggagcaaacgcagcaaaagtgaactgacttaagacctaagaagtgtttgtatgcgtttgtggctgttgaaactgcttcctaggttttaattcttaccactacaggcactttacaaataggcttaatttccattctgattgttttcaacaggatgtatagtgagttggatgtcatgtccacagcaactcagcatcagacagtggtgggagatgctgttgcagagactcaacatgttctgtctaaagaagattttctgaaattgatgcttcctgacagccccttagtggaggaggggcgaagaaaggttagtgacttagggagctttgaagttaccagaaacacaaaaaaaaaaaaaaaaaagt

SEQ ID NO: 13892 - DNA, 203 bp, Homo sapiens
tccctagatacaagaagccccacgggagcacacaggatggagactggtcgtgcttgtgcttttctccaagtcagcaccccaaaggtcaatgcacagagaccccgggtgggtgagcgctggcttctcaaacggccgaagttgcctcttttaggaatctctttggaattgggagcacgatgactctgagtttgagctattaaagt

SEQ ID NO: 13893 - DNA, 878 bp, Homo sapiens
  misc_feature 1, 877, 878: n = A,T,C or G
naagtacatcgccctagacaaaggtgagcggcgggggcgacctcagcccatctcagagccctcgcggacgcgtgggcccacctgtaccaccatgtgggactccaggcaccatctgttctccccagggacctgctgacttgaatgccagcccttgctcctctgtgttgctttgggccacctggggctgcaccccctgccctttctctgccccatccctaccctagccttgctctcagccaccttgatagtcactgggctccctgtgacttctgaccctgacacccctcccttggactctgcctgggctggagtctagggctggggctacatttggcttctgtactggctgaggacaggggagggagtgaagttggtttggggtggcctgtgttgccactctcagcaccccacatttgcatctgctggtggacctgccaccatcacaataaagtccccatctgatttttagacttgtcccaggtatgcttctgaaactccgtctcctggggctgggcaaggcatgagtctgggcctgggagtcctcgtctccacctggaacccctgacatcatcccattccttgggctgaaaggtctgggtctgggtcctctgggagttggtgtcctgggaaggggacctttgagctagttctgtgtggcttctggtcgtggaggagttcagattcccttgagggctgacctggtcaagctgcccgtggcccccgagcgcgtcacgctggccgacttcaagaacgtgctcagcaaccggcccgtgcacgcctgtccgtggagcggggcgatggcaggcggggttcccggcgtccctggccccagcttcccggccccgagtcctgccttggcccgtgtcagactcggtcnn

SEQ ID NO: 13894 - DNA, 1497 bp, Homo sapiens
ggagctccacgcggtggcggcctgggtacgcggggagcagcagcaggaggaggcagagcacagcatcgtcgggaccagactcgtctcaggccagttgcagccttctcagccaaacgccgaccaaggaaaactcactaccatgagaattgcagtgatttgcttttgcctcctaggcatcacctgtgccataccagttaaacaggctgattctggaagttctgaggaaaagcagctttacaacaaatacccagatgctgtggccacatggctaaaccctgacccatctcagaagcagaatctcctagccccacagaatgctgtgtcctctgaagaaaccaatgactttaaacaagagacccttccaagtaagtccaacgaaagccatgaccacatggatgatatggatgatgaagatgatgatgaccatgtggacagccaggactccattgactcgaacgactctgatgatgtagatgacactgatgattctcaccagtctgatgagtctcaccattctgatgaatctgatgaactggtcactgattttcccacggacctgccagcaaccgaagttttcactccagttgtccccacagtagacacatatgatggccgaggtgatagtgtggtttatggactgaggtcaaaatctaagaagtttcgcagacctgacatccagtaccctgatgctacagacgaggacatcacctcacacatggaaagcgaggagttgaatggtgcatacaaggccatccccgttgcccaggacctgaacgcgccttctgattgggacagccgtgggaaggacagttatgaaacgagtcagctggatgaccagagtgctgaaacccacagccacaagcagtccagattatataagcggaaagccaatgatgagagcaatgagcattccgatgtgattgatagtcaggaactttccaaagtcagccgtgaattccacagccatgaatttcacagccatgaagatatgctggttgtagaccccaaaagtaaggaagaagataaacacctgaaatttcgtatttctcatgaattagatagtgcatcttctgaggtcaattaaaaggagaaaaaatacaatttctcactttgcatttagtcaaaagaaaaaatgctttatagcaaaatgaaagagaacatgaaatgcttctttctcagttattggttgaatgtgtatctatttgagtctggaaataactaatgtgtttgataattagtttagtttgtggcttcatggaaactccctgtaaactaaaagcttcagggttatgtctatgttcattctatagaagaaatgcaaactatcactgtattttaatatttgttattctctcatgaatagaaatttatgtataagcaaacagaatacttttacccacttaaaaagagaatataacattttatgtcactataatcttttgttttttaagttaatgtatattttgttgtgaatatcttttgtggtgtgaataaatc

SEQ ID NO: 13895 - DNA, 520 bp, Homo sapiens
  misc_feature 1, 2, 3, 519, 520: n = A,T,C or G
nnncaatggacttccaaaataaaattaaatggtctcggccttgaaaaataaactgaagaagcagtctacagctacgggtgatggagtagctagggcctttcttagagcacaggctgctttgtttggatcctacagagatgcactgagatacaaacctggtgagcccatcactttctgtgaggagagttttgtaaagcaccgctcaagcgtgatgaaacagttcctggaaactgccattaacctccagctttttaagcagtttatcgatggtcgactggcaaaactaaatgcaggaaggggtttctctgatgtatttgaagaagagatcacttcaggtggcttttgtggagggaacccgaggtcatatcaacaatgggtgcatacagtcaagaaaggaggtgcactgttcaacacagcaatgaccaaagcaacccctgctgtacggacagcatataaatttgtctccattttaaattattaccaaagccatttgcttggagcatttctctggagaatacnn

SEQ ID NO: 13896 - DNA, 2549 bp, Homo sapiens
cgacccacgcgtccgcggacgcgtggggcagcttctgagaccagggttgctccgtccgtgctccgcctcgccatgacttcctacagctatcgccagtcgtcggccacgtcgtccttcggaggcctgggcggcggctccgtgcgttttgggccgggggtcgcttttcgcgcgcccagcattcacgggggctccggctggccgcggcgtatccgtgtcctccgcccgctttgtgtcctcgtcctcctcgggggcctacggcggcggctacggcggcgtccgtgaccgcgtccgacgggctgctggcgggcaacgagaagctaaccatgcagaacctcaacgaccgcctggcctcctacctggacaaggtgcgcgccctggaggcggccaacggcgagctagaggtgaagatccgcgactggtaccagaagcaggggcctgggccctcccgcgactacagccactactacacgaccatccaggacctgcgggacaagattcttggtgccaccattgagaactccaggattgtcctgcagatcgacaatgcccgtctggctgcagatgacttccgaaccaagtttgagacggaacaggctctgcgcatgagcgtggaggccgacatcaacggcctgcgcagggtgctggatgagctgaccctggccaggaccgacctggagatgcagatcgaaggcctgaaggaagagctggcctacctgaagaagaaccatgaggaggaaatcagtacgctgaggggccaagtgggaggccaggtcagtgtggaggtggattccgctccgggcaccgatctcgccaagatcctgagtgacatgcgaagccaatatgaggtcatggtcgagcagaaccggaaggatgctgaagcctggttcaccagccggactgaagaattgaaccgggaggtcgctggccacacggagcagctccagatgagcaggtccgaggttactgacctgcggcgcacccttcagggtcttgagattgagctgcagtcacagctgagcatgaaagctgccttggaagacacactggcagaaacggaggcgcgctttggagcccagctggcgcatatccaggcgctgatcagcggtattgaagcccagctgggcgatgtgcgagctgatagtgagcggcagaatcaggagtaccagcggctcatggacatcaagtcgcggctggagcaggagattgccacctaccgcagcctgctcgagggacaggaagatcactacaacaatttgtctgcctccaaggtcctctgaggcagcaggctcttctggggcttctgctgtcctttggagggtgtcttctgggtagagggatgggaaggaagggacccttacccccggcccttctcctgacctgccaataaaaatttatggtcccagcggaaaaaaaacacaaccaacacactaacacacacgcaaacacactaaatcacacgaacactaagaacaaaaacaaaagaccaacacaacatcatcacaaccataacccacccacacaaacgatagagactcaataaaacatgtccagctgtcctttcttacttgtcgtttttctccttcgctcgctcgtcccttcaagaagacaaacgaaacaaagacaccaagaaacgacgacaacgaagaacgtagaaaagaagagaaaagcgacaacagcaacagaaaagaaacaacaagagaaaagagcagaagaccacacactacacacacagaagacaaaacaacgagcacaaacagggcaggagcgagaagagaccacagagcagagcaaggagcgacagaggcacgaagcacaagaacagaacggagagaaggacacgacgacagagcagcacacagaacaggacagcaggcaagggaaggagagagagaaccgaaagagaaggaagcaacaagaggcaagcgagacagagaagaacgagcagaggaaagagaacaagagaccccgcaaagaagagagaggcgcagaagagaggagagaagaggcggagagaccagaagggacgagcagaagggagggaagggaaggaagaggaggcagaggagagaggaggcagaggaggagacaggggggggggacggagagaagaagagacaggagaaggcagggagaggaagagaagaggaagagaggagggaagaaggaagaggcgagggcgagcgaggagagcgagaggagggagggagggagggagaggaggcagggcgaaggagggggagagggaggcgcgggggagagggaggcgggagagggaggagggggggcaggacggaccgaggcgcgaggaggggggagggaagaggggaggggacgggggccagaggcgaggggggagcaacgacgagaggcggggcagcgaaagaggcgaggagcgagccgacccgacggacagccagacgcagcggcagacgggggcgacggcgagcgcggcccggggcggcagcgcccgcgagagaggcagggcaagacgacgcgagcagcgaggcggcgcccgacaaagggagcgcacagagggcggccagcagcga

SEQ ID NO: 13897 - DNA, 6769 bp, Homo sapiens
tccggaattcccgggtcgagccccccccccccccccggcagacgggagtttctcctcggggtcggagcaggaggcacgcggagtgtgaggccacgcatgagcggacgctaaccccctccccagccacaaagagtctacatgtctagggtctagacatgttcagctttgtggacctccggctcctgctcctcttagcggccaccgccctcctgacgcacggccaagaggaaggccaagtcgagggccaagacgaagacatcccaccaatcacctgcgtacagaacggcctcaggtaccatgaccgagacgtgtggaaacccgagccctgccggatctgcgtctgcgacaacggcaaggtgttgtgcgatgacgtgatctgtgacgagaccaagaactgccccggcgccgaagtccccgagggcgagtgctgtcccgtctgccccgacggctcagagtcacccaccgaccaagaaaccaccggcgtcgagggacccaagggagacactggcccccgaggcccaaggggacccgcaggcccccctggccgagatggcatccctggacagcctggacttcccggaccccccggaccccccggacctcccggaccccctggcctcggaggaaactttgctccccagctgtcttatggctatgatgagaaatcaaccggaggaatttccgtgcctggccccatgggtccctctggtcctcgtggtctccctggcccccctggtgcacctggtccccaaggcttccaaggtccccctggtgagcctggcgagcctggagcttcaggtcccatgggtccccgaggtcccccaggtccccctggaaagaatggagatgatggggaagctggaaaacctggtcgtcctggtgagcgtgggcctcctgggcctcagggtgctcgaggattgcccggaacagctggcctccctggaatgaagggacacagaggtttcagtggtttggatggtgccaagggagatgctggtcctgctggtcctaagggtgaagcaggcaaacctggtgaacagggtgttcctggtcagatgggcccccgtggcctgcctggtgagagaggtcgccctggagcccctggccctgctggtgctcgtggaaatgatggtgctactggtgctgccgggccccctggtcccaccggccccgctggtcctcctggcttccctggtgctgttggtgctaagggtgatgctggtccccaagggccccgaggctctgaaggtccccagggtgtgcgtggtgagcctggcccccctggccctgctggtgctgctggccctgctggaaaccctggtgctgatggacagcctggtgctaaaggtgccattggtcctcctggtattgctggtgctcctggcttccctggtgcccgaggcccctctggaccccagggccccggcggccctcctggtcccaagggtaacagcggtgaacctggtgctcctggcagcaaaggagacactggtgctaagggagagcctggccctgttggtgttcaaggaccccctggccctgctggagaggaaggaaagcgaggagctcgaggtgaacccggacccactggcctgcccggaccccctggcgagcgtggtggacctggtagccgtggtttccctggcgcagatggtgttgctggtcccaagggtcccgctggtgaacgtggttctcctggccctgctggccccaaaggatctcctggtgaagctggtcgtcccggtgaagctggtctgcctggtgccaagggtctgactggaagccctggcagccctggtcctgatggcaaaactggcccccctggtcccgccggtcaagttggtccccccggaccccctggcccacctggtgcccctggtcctgctggtgctcctgggattccctggtgctgatggtcctgctggagagcccggcaaggctggagagcgaggtgttcccggaccccctggcgctgtcggtcctgctggcaaagatggagaggctggagctcagggaccccctggccctgctggtcccgctggcgagagaggtgaacaaggccctgctggctcccccggattccagggtctccctggtcctgctggtcctccaggtgaagcaggcaaacctggtgaacagggtgttcctggagaccttggcgcccctggcccctctggagcaagaggcgagagaggtttccctggcgagcgtggtgtgcaaggtccccctggtcctgctggtccccgaggggccaacggtgctcccggcaacgatggtgctaagggtgatgctggtgcccctggagctcccggtagccagggcgcccctggccttcagggaatgcctggtgaacgtggtgcagctggtcttccagggcctaagggtgacagaggtgatgctggtcccaaaggtgctgatggctctcctggcaaagatggcgtccgtggtctgaccggccccattggtcctcctggccctgctggtgcccctggtgacaagggtgaaagtggtcccagcggccctgctggtcccactggagctcgtggtgcccccggagaccgtggtgagcctggtccccccggccctgctggctttgctggcccccctggtgctgacggccaacctggtgctaaaggcgaacctggtgatgctggtgctaaaggcgatgctggtccccctggccctgccggacccgctggaccccctggccccattggtaatgttggtgctcctggagccaaaggtgctcgcggcagcgctggtccccctggtgctactggtttccctggtgctgctggccgagtcggtcctcctggcccctctggaaatgctggaccccctggccctcctggtcctgctggcaaagaaggcggcaaaggtccccgtggtgagactggccctgctggacgtcctggtgaagttggtccccctggtccccctggccctgctggcgagaaaggatcccctggtgctgatggtcctgctggtgctcctggtactcccgggcctcaaggtattgctggacagcgtggtgtggtcggcctgcctggtcagagaggagagagaggcttccctggtcttcctggcccctctggtgaacctggcaaacaaggtccctctggagcaagtggtgaacgtggtccccctggtcccatgggcccccctggattggctggaccccctggtgaatctggacgtgagggggctcctggtgccgaaggttcccctggacgagacggttctcctggcgccaagggtgaccgtggtgagaccggccccgctggaccccctggtgctcctggtgctcctggtgcccctggccccgttggccctgctggcaagagtggtgatcgtggtgagactggtcctgctggtcccgccggtcctgtcggccctgttggcgcccgtggccccgccggaccccaaggcccccgtggtgacaagggtgagacaggcgaacagggcgacagaggcataaagggtcaccgtggcttctctggcctccagggtccccctggccctcctggctctcctggtgaacaaggtccctctggagcctctggtcctgctggtccccgaggtccccctggctctgctggtgctcctggcaaagatggactcaacggtctccctggccccattgggccccctggtcctcgcggtcgcactggtgatgctggtcctgttggtccccccggccctcctggacctcctggtccccctggtcctcccagcgctggtttcgacttcagcttcctgccccagccacctcaagagaaggctcacgatggtggccgctactaccgggctgatgatgccaatgtggttcgtgaccgtgacctcgaggtggacaccaccctcaagagcctgagccagcagatcgagaacatccggagcccagagggcagccgcaagaaccccgcccgcacctgccgtgacctcaagatgtgccactctgactggaagagtggagagtactggattgaccccaaccaaggctgcaaccttggatgccatcaaagtcttctgcaacatggagactggtgagacctgcgtgtaccccactcagcccagtgtggcccagaagaactggtacatcagcaagaaccccaaggacaagaggcatgtctggttcggcgagagcatgaccgatggattccagttcgagtatggcggccagggctccgaccctgccgatgtggccatccagctgaccttcctgcgcctgatgtccaccgaggcctcccagaacatcacctaccactgcaagaacagcgtggcctacatggaccagcagactggcaacctcaagaaggccctgctcctccagggctccaacgagatcgagatccgcgccgagggcaacagccgcttcacctacagcgtcactgtcgatggctgcacgagtcacaccggagcctggggcaagacagtgattgaatacaaaaccaccaagacctcccgcctgcccatcatcgatgtggcccccttggacgttggtgccccagaccaggaattcggcttcgacgttggccctgtctgcttcctgtaaactccctccatcccaacctggctccctcccacccaaccaactttccccccaacccggaaacagacaagcaacccaaactgaacccccccaaaagccaaaaaatgggagacaatttcacatggactttggaaaatatttttttcctttgcattcatctctcaaacttagtttttatctttgaccaaccgaacatgaccaaaaaccaaaagtgcattcaaccttaccaaaaaaaaaaaaaaaaaaaaaggaataaataaataactttttaaaaaaggaagcttggtccacttgcttgaagacccatgcgggggtaagtccctttctgcccgttgggcttatgaaaccccaatgctgccctttctgctcctttctccacaccccccttggggcctcccctccactccttcccaaatctgtctccccagaagacacaggaaacaatgtattgtctgcccagcaatcaaaggcaatgctcaaacacccaagtggcccccaccctcagcccgctcctgcccgcccagcacccccaggccctgggggacctggggttctcagactgccaaagaagccttgccatctggcgctcccatggctcttgcaacatctccccttcgtttttgagggggtcatgccgggggagccaccagcccctcactgggttcggaggagagtcaggaagggccacgacaaagcagaaacatcggatttggggaacgcgtgtcaatcccttgtgccgcagggctgggcgggagagactgttctgttctgttccttgtgtaactgtgttgctgaaagactacctcgttcttgtcttgatgtgtcaccggggcaactgcctgggggcggggatgggggcagggtggaagcggctccccattttataccaaaggtgctacatctatgtgatgggtggggtggggagggaatcactggtgctatagaaattgagatgcccccccaggccagcaaatgttcctttttgttcaaagtctatttttattccttgatatttttcttttttcttttttttttgtggatggggacttgtgaatttttctaaaggtgctatttaacatgggaggagagcgtgtgcggctccagcccagcccgctgctcactttccaccctctctccacctgcctctggcttctcaggcctctgctctccgacctctctcctctgaaaccctcctccacagctgcagcccatcctcccggctccctcctagtctgtcctgcgtcctctgtccccgggtttcagagacaacttcccaaagcacaaagcagtttttccccctaggggtgggaggaagcaaaagactctgtacctattttgtatgtgtataataatttgagatgtttttaattattttgattgctggaataaagcatgtggaaatgacccaaacataatccgcagtggcctcctaatttccttctttggagttgggggaggggtagacatggggaaggggccttggggtgatgggcttgccttccattcctgccctttccctccccactattctcttctagatccctccataaccccactcccctttctctcacccttcttataccgcaaacctttctacttcctctttcattttctattcttgcaatttccttgcaccttttccaaatcctcttctcccctgcaataccatacaggcaatccacgtgcacaacacacacacacactcttcacatctggggttgtccaaacctcatacccactccccttcaagcccatccactctccaccccctggatgccctgcacttggtggcggtgggatgctcatggatactgggagggtgaggggagtggaacccgtgaggaggacctgggggcctctccttgaactgacatgaagggtcatctggcctctgctcccttctcacccacgctgacctcctgccgaaggagcaacgcaacaggagaggggtctgctgagcctggcgagggtctgggagggaccaggaggaaggcgtgctccctgctcgctgtcctggccctgggggagtgagggagacagacacctgggagagctgtggggaaggcactcgcaccgtgctcttgggaaggaaggagacctggccctgctcaccacggactgggtgcctcgacctcctgaatccccagaacacaacccccctgggctggggtggtctggggaaccatcgtgcccccgcctcccgcctactcctttttaagc

SEQ ID NO: 13898 - DNA, 3000 bp, Homo sapiens
gtcgcgctgttgccgctggatatcgtctcactgtactgcagggagccatgtgacaactcgtgttcgtctgtgtgggcgcacatgtgccctttagccacgtgttcattgtgatgttgcacggattatgaggggggtaacttaccccgtagacgggggtaacacggttcacaccgcgccctgctttccggaagttaaggtaatgcccatttttcggagctcccctgtgagagtggacccggttcttgaccggggctcttccagggcaacacggaaagtccagggtgcccgacaccacgggcaaccacagactagggtcaggtttccacaaattctgggcttaaggtagtaaagtctatcctgaaagatggaaagggataagaggaccttcaacccaattggttttctataccccaaggctttttgtgccccaaggtggcccatgtgtgtcaacagtcgaggggaatccctgccctcctgggagccaagaaggaagtctctcaaaactagaagggaaaggtgttttctccacatcaatccagctttggagacattctattagtgacatatgccccttcccccaaaaacaacaatgaagtgttctgtgtgctaacaacatagcttttaaaaaaaaaaaaagtaaaacaaaattctgcatttttataaaacttgataaaaaatagtatttcaaactgtacagtcaccagaagtacacagttatcaaaaatgcacacacttcacttggcatctccagcaccttcagctttctgtgcctggtctgttttggcatctccattttctgcagggttattcccctccttgccagcatcagcttttccctttttccctttgggtaccttctctcccttctttgcaggggcctttttaggcttgggctctggctttggaggagcaggtttagcagacaacctcgcggatcttctctgtggttcgtccttcacctttgctttatctgccgtcgccgccgccaccatgcccaagagaaaggctgaaggggatgctaagggagataaagcaaaggtgaaggacgaaccacagagaagatccgcgaggttgtctgctaaacctgctcctccaaagccagagcccaagcctaaaaaggcccctgcaaagaagggagagaaggtacccaaagggaaaaagggaaaagctgatgctggcaaggaggggaataaccctgcagaaaatggagatgccaaaacagaccaggcacagaaagctgaaggtgctggagatgccaagtgaagtgtgtgcatttttgataactgtgtacttctggtgactgtacagtttgaaatactattttttatcaagttttataaaaatgcagaattttgttttactttttttttttttttaaaagctatgttgttagcacacagaacacttcattgttgtttttgggggaaggggcatatgtcactaatagaatgtctccaaagctggattgatgtggagaaaacacctttcccttctagttttgagagacttcctcttggctcccaggaggagggattccctgactttgacacacatggccaccttggcacaaaagccttgtggtatagaaaaacaaatttgtttttatgtcctcttctccctttccatctttcagcatagacttaactcccttaagcccagacatctgttgagacctgacccctagtcattggttaccagtgtgtcaggcaatctggactttccagtgatgccactgagatggcacctgtcaaaagagcagtggttccatttctagattgtggatcttcagataaattctgccattttcatttcacttcctgaaagtcagggtcggcttgtgaaaagttgttaaacaacatgctaaatgtgaaatgtcaaccctcactctaaactttccctgttcagagcatcagatgaagacttcattgggttttatagtggctttctgatttttggtagtccattgaagaagggagtttgaaagttgttgtatactgttaacgattgtctgcccatgtcctgcctgaaataccatgattgtttatggaaagtatctttaataaagctggatacagtttggcttggaatgctgcctctgatcttttcccacaagtggggtaacctggtttatccaagtctcttggaacagggtacgttctgctttgaggtactccatgtacagtctaatgatgatctttcactgatttatagtcagcttccaaaacacacagtgctaggtgcagttaggaaggattccaggagtagacttagctgatggtgaaaggctgggagtatggagtgatttctgtacttggttatgcagcattccctgcagggttgttttttgcatgactccgaatacatgaagtgtattaaatgcagatttttggtagatctgcggttttggctgggtagctgacaggagcctctctacttccatctgcatttgcaacttctataaaattagcaaattaatagactcatgtcagagagtgtctctgtgaatgtgtacacagttgtccatttgtaaggtagatgacactttgctcctaagtagacctgcaaacaaagacaatggggtctttcctgattcctttagtttggagatgcagagaaccccacgtttctctaagtgaaatggcaagaagttatttgttagaatatggaactggtaacaaattcatgtttgcaccttgaatttgctttcacagacctggctgtattgttggacaggaataaagtaaattggagactaattgctttgtccattcccttagtcaaaaaagtatcgctgttaagttcttgaggttttttgtgtattatctctcaagtgttgagatgtttgtgtaatatatgtatcacactcatggatgaggaatcaggcacagatgaaacttgttgaaggttatgtgtacatttaatgagcagcagagtcaggattcagaccctcaactagacaaaagtcatctctgacagactcttattcaggataaaatacca

SEQ ID NO: 13899 - DNA, 1605 bp, Homo sapiens
cgacccacgcgtccggtgagtgtctccagtgtctacgaacaacatgagagcacacctcttagaggaagacagaaaacaggtcttgattccccaactggcattgacttttctgatattactgccaactcttttactgtgcactggattgctcctcgagccaccatcactggctacaggatccgccatcatcccgagcacttcagtgggagacctcgagaagatcgggtgccccactctcggaattccatcaccctcaccaacctcactccaggcacagagtatgtggtcagcatcgttgctcttaatggcagagaggaaagtcccttattgattggccaacaatcaacagtttctgatgttccgagggacctggaagttgttgctgcgacccccaccagcctactgatcagctgggatgctcctgctgtcacagtgagatattacaggatcacttacggagaaacaggaggaaatagccctgtccaggagttcactgtgcctgggagcaagtctacagctaccatcagcggccttaaacctggagttgattataccatcactgtgtatgctgtcactggccgtggagacagccccgcaagcagcaagccaatttccattaattaccgaacagaaattgacaaaccatcccagatgcaagtgaccgatgttcaggacaacagcattagtgtcaagtggctgccttcaagttcccctgttactggttacagagtaaccaccactcccaaaaatggaccaggaccaacaaaaactaaaactgcaggtccagatcaaacagaaatgactattgaaggcttgcagcccacagtggagtatgtggttagtgtctatgctcagaatccaagcggagagagtcagcctctggttcagactgcagtaaccaacattgatcgccctaaaggactggcattcactgatgtggatgtcgattccatcaaaattgcttgggaaagcccacaggggcaagtttccaggtacagggtgacctactcgagccctgaggatggaatccatgagctattccctgcacctgatggtgaagaagacactgcagagctgcaaggcctcagaccgggttctgagtacacagtcagtgtggttgccttgcacgatgatatggagagccagcccctgattggaacccagtccacagctattcctgcaccaactgacctgaagttcactcaggtcacacccacaagcctgagcgcccagtggacaccacccaatgttcagctcactggatatcgaagtgcggggtgacccccaaggagaagaccggaccaatgaaagaaatcaacccttgctcctgacaagctcatcccgggggttgtatcaggacttatgggtgggacacccaaactactgaagtgacgtgtctacgctccttagcggaaattgaaaaggagaaccagctcagggagtggcaccactcctggagaatggcagccacacaaaaaaggtcgtgtgaaggatgagggaaccccacacttaggggaaaccaggcggaacacacgggtcacgggtgcgtcaacagggcaacaagcgaaaacccgaaggaaacacccacggtaaacggggaaaatc

SEQ ID NO: 13900 - DNA, 2040 bp, Homo sapiens
agcaatatgactgtaaatggtacattccgctcacggacctcagcttccagatggtggatgaattggaggcactacccaacatccctctggtgccagatgaggaactggatgccttgaagatcaaaatctcccaaatcaagagcgacatccaacgagagaagagagcaaataagggcagcaaggtcatggagaggctgaggaagaagctgtcagagcaggagtcactgctgctgttaatgtctcccagcatggccttccgcgttcacagtcgcaacggcaagagttacacgttccttatttcctctgactatgagcgagccgagtggagagaaagcatccgagagcagcagaagaaatgtttcaaaagtttctctctgacatctgtggagctacaaatgctgaccaactcatgtgtaaaacttcagacggttcaccacattccactgaccatcaacaaagaagatgacgagtctcctggactctacggcttcctgcatgtcatcgtccactcagccaccggctttaagcagagctcaaatctctactgcaccctggaggtggattcctttggatattttgtgaataaagcaaagactcgagtctacagggacacaactgagccaaactggaatgaggagtttgagatagagctagaaggctcccagaccctgcggatactatgttatgaaaagtgttacaacaaaatgaagatgacgaaggaagatggtgagagcgcagacaagctcatggggaaaggccaggtccagctggacccccaaaccctacaggacagagactggcagcggactgtcatcgacatgaatggaattgaagtgaaactctccgtcaagttcacgagcagggagttcagcctgaagagaatgccctcccgcaaacagacaggggtcttcggtgtcaagattgctgtagtcacaaagagagagaggtccaaggtaccttacattgtgcgccagtgtgtggaagagatcgagcgccggggtatggaggaggtgggcatctaccgagtgtctggagtggccacagacatccaggcactgaaggcagcctttgatgtcaataacaaggatgtgtccgtgatgatgagcgagatggacgtgaacgagcgccggcgagctttgtggacctgtacgtgccgcggaaaatgctccgcaagcaaccgcatcattgctgccaaggaccacgcgtcgcatgccagatgaacgtggccgaggttgataggaccacaggcccggtttaatgcccagttttaaaacctatggcatgctgcgggggccagttcgcaattcggggcgggttgggcgagtcagaatgattctattctccgattgggctaaggctgatggaattgtctcaaagaacttttgagcagaagaacatcgggaatttgttacaaataaaagttttaagtacctgcccgggcggccggccgaggttgataggaccacaggccggtttaatggccagtttaaaacctatggcatctgcggggccattcgcaggatgggcgagtcagatgattctattctccgattggctaaggctgatggaattgtctcaaagaacttttgagcagaagaaatcgggaatttgttacaaataaaagttttaagtacctgcccgggcggccgcccgggcaggtactatgtcttttgatttagcatgccttctgtagaccttccaaagagccccacactggcaccgtcacccctaggaaggcaggtgatggttgatgtaccccaatactgcttcttgcttattctgttctaactctgagtagagtctgggtttaagataacaccgattaatgtatccccacaataacgtgagggtcagagaaaaaccagggaagaaatttccagaaaaaaaccctccagattttcccacgggagtgtttgccctccagtgtgactgaacgaccttgcccatggcttcgtccagacagcgcagctgcagtatggcctggacagaagcacctactattcttgaatattgaaataaaataataaacttgcaatgatc

SEQ ID NO: 13901 - DNA, 1746 bp, Homo sapiens
gccgacccacgcgtccgggtgaacgtggtccccctggtcccatgggcccccctggattggctggaccccctggtgaatctggacgtgagggggctcctggtgccgaaggttctcctggtgctcctggtgcccctggccccgttggccctgctggcaagagtggtgatcgtggtgagactggtcctgctggtcccgccggtcctgtcggccctgttggcgcccgtggccccgccggaccccaaggcccccgtggtgacaagggtgagacaggcgaacagggcgacagaggcataaagggtcaccgtggcttctctggcctccagggtccccctggccctcctgggctctcctggtgaacaaggtccctttggagcctctggtcctgctggtccccgaggtccccctggctctgctggtgctcctggcaaagatggactcaacggtctccctggccccattgggccccctggtcctcgcggtcgcactggtgatgctggtcctgttggtccccccggccctcctggacctcctggtccccctggtcctcccagcgctggtttcgacttgagctttctgccccagccacctgaagagaaggctcacgatggtggccgctactaccgggctgatgatgccaatgtggttcgtgaccgtgacctcgaggtggacaccaccctcaagagcctgagccagcacatcgagaacatccggagcccacagggcagccgccagaaccccgcccgcacctgccgtgacctcaagatgtgccactctgactggaagagtggagagtactggattgaccccaaccccggctgcaacctggatgccatcaaagtcttctgcaacatggagactggtgagacctgcgtgtaccccactcagcccagtgtggcccagaagaactggtacatcagcaagaaccccaaggacaagaggcatgtctggttcggcgagagcatgaccgatggattccagttcgagtatggcggccagggctccgaccctgccgatgtggccatccagctgaccttcctgcgcctgatgtccaccgaggcctcccagaacatcacctaccactgcaagaacagcgtggcctacatggaccagcagactggcaacctcaagaaggccctgctcctccagggctccaacgagatcgagatccgcgccgagggcaacagccgcttcacctacagcgtcactgtcgatggctgcacgagtcacaccggagcctggggcaagacagtgattgaatacaaaaccaccaagaccctcccgcctgcccatcatcgatgtggcccccttggacgttggtgccccagaccaggaattcggcttcgacgttggccctgtctgcttcctgtaaactccctccagcccagcccgctgctcactttccaccctctctccacctgcctctggcttctcaggcctctgctctccgacctctctcctctgaaaccctcctccacagctgcagcccatccgtgtgcggctccagcccagcccgctgctcactttccaccctctctccacctgcctctggcttctcaggcctctgctctccgacctctctcctctgaaaccctcctccacagctgcagcccatcctcccggctccctcctagtctgtcctgcgtcctctgtccccgggtttcagagacaacttcccaaagcacaaagcagtttttccccctaggggtgggaggaagcaaaagactctgtacctgcccgggcggccac

SEQ ID NO: 13902 - DNA, 330 bp, Homo sapiens
acgcgggagaatccttcttgatagtttgcaggcaaaacaaatgtaatgttgcagatccgcaggcagaagctctgcccttctgtatcctatgtatgcagtatgctttttcttgccagcttgggccattcttgcttagacagtcagcatttgtctcctcctttaactgagtcatcatcttagtccaactaatgcagtcgatacaatgcgtagatagaagaagccccacgggagccaggatgggactggtcgtgtttgtgcttttctccaagtcagcacccaaaggtcaatgcacagagaccccgggtgggtgagcgctggcttctcaaacgg

SEQ ID NO: 13903 - DNA, 757 bp, Homo sapiens
  misc_feature 743: n = A,T,C or G
acttagggagtcgacccacgcgtccggtgctgtgtgtgaggcgcctgccatggtgatggccgtgcacagccagaccattcagatcccaccgtgccccagcgggtggtcctcgctgtggatcggctactcttttgtgatgcacaccagcgctggtgcagaaggctctggccaagccctggcgtcccccggctcctgcccggaggagtttagaagtacgccattcatcgagtgtcacggccgtgggacctgcaattactacgcaaacgcttacagcttttggctcgccaccatagagaggagcgagatgttcaagaagcctacgccgtccaccttgaaggcaggggagctgcgcacgcacgtcagccgctgccaagtctgtatgagaagaacataatgaagcctgactcagctaatgtcacaacatggtgctacttcttcttctttttgttaacagcaacgaaccctagaaatatatcctgtgtacctcactgtccaatatgaaaaccgtaaagtgccttataggaatttgcgtaactaacacaccctgcttcattgacctctacttgctgaaggagaaaaagacagcgataagctttcaatagtgggcataccaaatgggcacttttggatggaaataaaatatcaatattttcttgcaatccaatggcactgatgtgttgaagtggagaccttccattcaggaaaaccaaggggtgctagggggggtgtggggtgccttcccntactgttttggccc

SEQ ID NO: 13904 - DNA, 1788 bp, Homo sapiens
  misc_feature 1, 2, 3, 1773, 1774, 1775, 1776, 1777, 1778, 1779, 1780,1781, 1782, 1783, 1784, 1785, 1786, 1787, 1788: n = A,T,C or G
nnnatgactcgcactgacgcgccgattcctggcttttgcaaggctgtggtcggtggtcatcagtgctcttgacccaggtccagcgagccttttccctggtgttgcagctgttgttgtaccgccgccgtcgccgccgtcgccgcctgctctgcggggtcatggtgtgcttccgcctcttcccggttccgggctcagggctcgttctggtctgcctagtcctgggagctgtgcggtcttatgcattggaacttaatttgacagattcagaaaatgccacttgcctttatgcaaaatggcagatgaatttcacagtacgctatgaaactacaaataaaacttataaaactgtaaccatttcagaccatggcactgtgacatataatggaagcatttgtggggatgatcagaatggtcccaaaatagcagtgcagttcggacctggcttttcctggattgcgaattttaccaaggcagcatctacttattcaattgacagcgtctcattttcctacaacactggtgataacacaacatttcctgatgctgaagataaaggaattcttactgttgatgaacttttggccatcagaattccattgaatgacctttttagatgcaatagtttatcaactttggaaaagaatgatgttgtccaacactactgggatgttcttgtacaagcttttgtccaaaatggcacagtgagcacaaatgagttcctgtgtgataaagacaaaacttcaacagtggcacccaccatacacaccactgtgccatctcctactacaacacctactccaaaggaaaaaccagaagctggaacctattcagttaataatggcaatgatacttgtctgctggctaccatggggctgcagctgaacatcactcaggataaggttgcttcagttattaacatcaaccccaatacaactcactccacaggcagctgccgttctcacactgctctacttagactcaatagcagcaccattaagtatctagactttgtctttgctgtgaaaaatgaaaaccgattttatctgaaggaagtgaacatcagcatgtatttggttaatggctccgttttcagcattgcaaataacaatctcagctactgggatgcccccctgggaagttcttatatgtgcaacaaagagcagactgtttcagtgtctggagcatttcagataaatacctttgatctaagggttcagcctttcaatgtgacacaaggaaagtattctacagctcaagactgcagtgcagatgacgacaacttccttgtgcccatagcggtgggagctgccttggcaggagtacttattctagtgttgctggcttattttattggtctcaagcaccatcatgctggatatgagcaattttagaatctgcaacctgattgattatataaaaatacatgcaaataacaagattttcttacctctcagttgttgaaacactttgcttcttaaaattgatatgttgaaactttaattcttttatcaatcccagcattttgagatcagtctttattaataaaacctgttctctttaatcagcttaaaatccaaagtgtcatatttactggtcctggagacaaacttgttcaaaagaacatcaacgtgcaatgttttaaggtctatcttaagaagccctggccaaattttgatcctaaccttgaagtatgccttgaacttattaacatggccattataagaataaaatatgtagttgtgtcttaatggaattaataaatgtcatttcacnnnnnnnnnnnnnnnn

SEQ ID NO: 13905 - DNA, 658 bp, Homo sapiens
  misc_feature 657, 658: n = A,T,C or G
gagagggactctggccctgtcacccaggctggagtgcaatggcacgatattggctcactgcaacctctgcctcctgggttcaagtgattttcctgcctcagcctcctgagtaacagggattaacaggcatgtgccaccacgcccagctaatttttttgtatttttagtagaggcaggatttcaccatgttgtccaggttggtctcaagctcttgacctcatgatccatctgcctcagcctcccaaagtgctcggattacaggcatgaggcactgcgcccagctgactgatttcttttggctaaacactttttaagtagatgatctattttttcccccgtttatgtatgcaattatcaccaggaaaattgtaactatactcaataatatgggctttacaattggacagacactttatttacgatatctgggctctgtggaatattctttgaaattctggaaatcattatgtctaaggctgaggtgtaagaagctctgcattccttcctgccttgattttgctacttctaaagtaagcatgacagggatataatagtttatgaagactgactaagaaacaacttgtgtcctgccaggagaatacagtgctcatgctttagaagcactgaatttattgaagtcacaaaagtacctgcccnn

SEQ ID NO: 13906 - DNA, 458 bp, Homo sapiens
accaatgtgtggcagtccaaaattacgaggaaaatgagttcccttcatgggtcacatcagcaatttttttttccccttttgagacagagtcttgctctgctgcccaggttggagtgcagtgggcgacagtgaggccctgtctcaaaaaaaaaaaaaatgcaagtctggagaaatatagctgggagtcagtaatgccagttttagctgagggagttaagatcatttaatcagtgttaaggaagaaactcaatagtagtgaccaccaatacttaaggaaaaaggataaagtaagaggaatgataaaggctggctgaaatatcttggtgtctagcctaagaaaggaggggttagatgctcatgtttattaatatggatctagagaagcatttatttactaatacattttatttgtggtctctaatttaaaattaccttttcatcctgcttgattttccttc

SEQ ID NO: 13907 - DNA, 2136 bp, Homo sapiens
ggagtcgacccacgcgtccggtccttcagactgcccggagagcgcgctctgctgccgcctgcctgcctgccactgagggttcccagcaccatgagggcctggatcttctttctcctttgcctggccgggagggccttggcagcctctcagcaagaagccctgcctgatgagacagaggtggtggagaactgtggcagaggtgactgaggtatctgtgggagctaatcctgtccaggtggaagtaggagaatttgatgatggtgcagaggaaaccgaagaggaggtggtggcggaaaatccctgccagaaccaccactgcaaacacggcaaggtgtgcgagctggatgagaacaacacccccatgtgcgtgtgccaggaccccaccagctgcccagcccccattggcgagtttgagaaggtgtgcagcaatgacaacaagaccttcgactcttcctgccacttctttgccacaaagtgcaccctggagggcaccaagaagggccacaagctccacctggactacatcgggccttgcaaatacatccccccttgcctggactctgagctgaccgaattccccctgcgcatgcgggactggctcaagaacgtcctggtcaccctgtatgagagggatgaggacaacaaccttctgactgagaagcagaagctgcgggtgaagaagatccatgagaatgagaagcgcctggaggcaggagaccaccccgtggagctgctggcccgggacttcgagaagaactataacatgtacatcttccctgtacactggcagttcggccagctggaccagcaccccattgacgggtacctctcccacaccgagctggctccactgcgtgctcccctcatccccatggagcattgcaccacccgctttttcgagacctgtgacctggacaatgacaagtacatcgccctggatgagtgggccggctgcttcggcatcaagcagaaggatatcgacaaggatcttgtgatctaaatccactccttccacagtaccggattctctctttaaccctccccttcgtgtttcccccaatgtttaaaatgtttggatggtttgttgttctgcctggagacaaggtgctaacatagatttaagtgaatacattaacggtgctaaaaatgaaaattctaaccagaacgtggtttgcctgaagctgtaactgagagaaagattctggggctgtgttatgaaaatatagacattctcacataagcccagttcatcaccatttcctcctttacctttcagtgcagtttcttttcacattaggctgttggttcaaacttttgggagcacggactgtcagttctctgggaagtggtcagcgcatcctgcagggcttctcctcctctgtcttttggagaaccagggctcttctcaggggctctagggactgccaggctgtttcagccaggaaggccaaaatcaagagtgagatgtagaaagttgtaaaatagaaaaagtggagttggtgaatcggttgttctttcctcacatttggatgattgtcataaggtttttagcatgttcctccttttcttcaccctccccttttttcttctattaatcaagagaaacttcaaagttaatgggatggtcggatctcacaggctgagaactcgttcacctccaagcatttcatgaaaaagctgcttcttattaatcatacaaactctcaccatgatgtgaagagtttcacaaatccttcaaaataaaaagtaatgacttagaaactgcaaaaaaaaaaaaaaaaaaaaaaaaaaaaaaaaaaaaaaaaaaaaaaaaaaaaaaaaaaaaaaaaaaaaaaaaaaaaaaaaaaaaaaaaaaaaaaaaaaaaaaaaaaaaaaaaaaggggggggccctaaaaatttttaaaaaaaaaaacccccccccccccccctgaaaccggaaaaaaaaaaagaaggcaagggggggggaaaactggtttttggccctttaaagggggcacaaaaaagggaatgccttcaaaattttcaaaaaaaaaactttttttaaacggctttaaagggggggggggccaaaaccaaaaaaggtttttaaaaaggtggggaccccggggacccggcccaaaaaaaaatcctttgccg

SEQ ID NO: 13908 - DNA, 1091 bp, Homo sapiens
  misc_feature 1, 2, 3, 1059, 1060, 1061, 1062, 1063, 1064, 1065, 1066,1067, 1068, 1069, 1070, 1071, 1072, 1073, 1074, 1075, 1076,1077, 1078, 1079, 1080, 1081, 1082, 1083, 1084, 1085, 1086,1087, 1088, 1089, 1090, 1091: n = A,T,C or G
nnnccgagcgtggtggcttgtgcctgtaatctcagctacttgggaggctgaggcaggagaatcgcttgatcccgggagtcggaggttgcagtgagccgagattgcgccactgcactccagcctgggcgacagagcaagactgtctcacaacagaaaaagaagaaagaaaagtgactttgtttgggctgcccggcaacggatcccaagatagtgattccagagcaagttgtttacgtggaggtgaagaaaaccctacaggggctgaggttgggagaagaaggcagtcctcacagaaggtgttattaagcaagtccccacatggactgttaaactttcatcccatggaggaaatcctggaagccaccaaagaacacatacttcagagttacccaagctgaggcgagagtgagcctgaaaataatattgcaccaacattcaccagtcagccattgaggactgctcctggggatgttataataactctctcaactttccagcctgcccctgggcaggcaaatcaggcatctgtacccagagaaagtccctaggcagagaagcgctgtgtgggcagttggcagtcaggctggtgtgcactaaagtagtaagggctggggggaaagaggtgagtacaaattgagttcatctgtgaggcaggaaatgcttatcaaaccccaaattaatcatttttaaataacccatgatctattgacttgtaagagtgcagaaatttaaaatgaggctacattattttaaacatgctcctgtttcacttttactgatcaataaacagtaagtccttaggaaagggcaaggaccccgaggctatagttccagcccattctcatatcataagacatgtcacggtctatataaaatcaaacaacagctaaccccatctctactacacatacaaaaaaattagccaggcatggtggcacacgcctgtaatcccagctactcgagaggctgagacaggagaatcacttgaaatcagtaatggaggtcgcagtgagcaaagatcacgccactacactccaacttgggctacagagtgagacnnnnnnnnnnnnnnnnnnnnnnnnnnnnnnnnn

SEQ ID NO: 13909 - DNA, 2009 bp, Homo sapiens
gcgtccgcggacgcgtgggggctggaaaacagcaaaccaccttcacggatcttgtggcccaattaggcttggcatctgctctgaggccagatggagaatacactttgctggcacctgtgaataatgcattttctgatgatactctcagcatggatcagcgcctccttaaattaattctgcagaatcacatattgaaagtaaaagttggccttaatgagctttacaacgggcaaatactggaaaccatcggaggcaaacagctcagagtcttcgtatatcgtacagctgtctgcattgaaaattcatgcatggagaaagggagtaagcaagggagaaacggtgcgattcacatattccgcgagatcatcaagccagcagagaaatccctccatgaaaagttaaaacaagataagcgctttagcaccttcctcagcctacttgaagctgcagacttgaaagagctcctgacacaacctggagactggacattatttgtgccaaccaatgatgcttttaagggaatgactagtgaagaaaaagaaattctgatacgggacaaaaatgctcttcaaaacatcattctttatcacctgacaccaggagttttcattggaaaaggatctgaacctggtgttactaacattttaaagaccacacaaggttcaaatccttttccaatgaaaactcctggtgtcaggtgataaagaatgatgttttgaagagcatttgaacctggtgttactaacattttaaagaccacacaaggaagcaaaatctttctgaaagaagtaaatgatacacttctggtgaatgaattgaaatcaaaagaatctgacatcatgacaacaaatggtgtaattcatgttgtagataaactcctctatccagcagacacacctgttggaaatgatcaactgctggaaatacttaataaattaatcaaatacatccaaattaagtttgttcgtggtagcaccttcaaagaaatccccgtgactgtctataagccaattattaaaaaatacaccaaaatcattgatggagtgcctgtggaaataactgaaaaagagacacgagaagaacgaatcattacaggtcctgaaataaaatacactaggatttctactggaggtggagaaacagaagaaactctgaagaaattgttacaagaagacacacccgtgaggaagttgcaagccaacaaaaaaagttcaaggatctagaagacgattaagggaaggtcgttctcagtgaaaatccaaaaaccagaaaaaaatgtttatacaaccctaagtcaataacctgaccttagaaaattgtgagagccaagttgacttcaggaactgaaacatcagcacaaagaagcaatcatcaaataattctgaacacaaatttaatatttttttttctgaatgagaaacatgagggaaattgtggagttagcctcctgtggagttagcctcctgtggtaaaggaattgaagaaaatataacaccttacaccctttttcatcttgacattaaaagttctggctaactttggaatccattagagaaaaatccttgtcaccagattcattacaattcaaatcgaagagttgtgaactgttatcccattgaaaagaccgagccttgtatgtatgttatggatacataaaatgcacgcaagccattatctctccatgggaagctaagttataaaaataggtgcttggtgtacaaaactttttatatcaaaaggctttgcacatttctatatgagtgggtttactggtaaattatgttattttttacaactaattttgtactctcagaatgtttgtcatatgcttcttgcaatgcatattttttaatctcaaacgtttcaataaaaccatttttcagatataaagagaattacttcaaattgagtaattcagaaaaactcaagccttaagttaaaaagtggttgtggacttgggaacaggacgttatacctcttttactgtaacaagtacctcggccgccacc

SEQ ID NO: 13910 - DNA, 1182 bp, Homo sapiens
  misc_feature 1, 1179, 1180, 1181, 1182: n = A,T,C or G
nagagtccaaacagtgcccagagtccaaacagtgcccagagtccaaacagtgctcagagtccaaacagtgcccagatccaaacagtgcccagagtccaaacagtgctcagagtccaaacagtgcccagagtccttccagtgcccagtgtccgaacggctgatcttcctgcggctgaaccgcccggctgagccgacattgccggcgtcttggcgattcggcccgacgagctccgctttcgctacagcatggtggcctactggagacaggctggactcagctacatccgatactcccagatctgtgcaaaagcagtgagagatgcactgaagacagaattcaaagcaaatgctgagaagacttctggcagcaacgtaaaaattgtgaaagtaaagaaggaataatctaccctgactaaagcttgaaatgctacatttccaaggtgaagatgtgtgggcacatgttatggcagattgaacaaggatctcattccatgggaaaaaaaaaaatcctgtctggttcataaatggacaatgtcaataaatggaaatatggttccactgctttaccaacacacaccacacaactacaaaaacaccctgggaggccctctattccgggggtccggaacaaagggggctactcgaacagtgggccccatgtggcccccatagcgcggtttccctggaacccgacgtttccttgggtccccagggggtaagaattcgcgccggggtccccccctatatagggggcgcccctcaatcaaatctgcccgcaaacagcccgggggttaaacccgcggctttaaaggacagccggcgcgaccaccgcgcgcgccaacggcgccgcgcccagacacacgacgaccgacgatgacaccgcgttacccacggctgcgggccgagcaccaaccggcacaccgcgctgagcgagagccccccgggacggcaccgccggacaagcaacgaccagtcgcaacggggcgcgcacgcgaaagcgacaacccaagcgacagagcgcgcgccacagaacgaaggcagcaaccctgcggaccccaccaagccggcccgtcaccgagcacacccagcaccgagatgccggcccgccggcgcaagcaagggcggcaccacagcgacggcgccgcgacgggccagagcgccgggtcgcggcggaggcannnn

SEQ ID NO: 13911 - DNA, 1004 bp, Homo sapiens
  misc_feature 1, 1003, 1004: n = A,T,C or G
nacaatccaattttcttccccttttatctctcgcttaaaaggacaaggcccaatattaccccccttttttttttttaaggatcccttttctccaccggctctgtcctactcactcaccagccaaccctggttcacccattccttcttaaccttctaatactggatttccaacaccccccccgccccactaattttgtattttaataagatgcgttccaccatgttaccaagatggtctcgatctcctgacctcgtgatctgccccctcggcctccaaatgctgggattacagcatgaccacccgcgcccgctttactttccgcaacttattgagagatgtcatgatccttatggacccttcagggtttctacacagaaaagaaagagacaagaaacagagggccctcgaactctcagaaatagccaagatggcataattaagtctatgaatcaagataggttttctaagtggagagcaatactaaatttcttgtaggtgaagactaaaggaaataccaagcatctttattttaacaattctctaagaattagaaaaattaactcatttttaaacatttaagtctaccacacccatcatcatgacttaccaattctttacaaagctcgatcctatctcaaaaagccacatatgttaatattctaccatcaaatccagtatctcacctcttgctcaaatgtaaatgccactgatgcatttatttgttctgtcaaagaatattgtcttggggcaaccatggggtcctcacatacagagactttaagaatggaaaaataaaatgcaatagtttggttcaccaccccttaaccaggacaaagaaaacaacttcagcatgactgacatcagagaacactcagcccttcctcaccacataaactcccatacttcttgccatgagagtttctggcaaggaagcagagtatctatgatttattccataagcaaggtaagtccaaaggaagggaaaataattatcaccaaaann

SEQ ID NO: 13912 - DNA, 1390 bp, Homo sapiens
  misc_feature 1383, 1384, 1385, 1386, 1387, 1388, 1389, 1390: n = A,T,C or G
tcgacccacgcgtccggattgttgcggtgcgctggagccgagtttcgctctgctgcccaggctggagtacagtgatgtgatctcctgacgtcaagtgatccattcgcctcggcctcccaaagttctgggattacaagtgtgagccactgccactggctgaaaaagtcttattgtggcataattgaatacaaaaacacgttaaaataaaatgtcaacctcctggagtgatcggttacagaatgcagcagatatgcctgctaacatggataagcatgccctgaaaaagtatcgtcgagaagcctatcatcgggtgtttgtgaaccgaagtttagcaatggaaaagataaagtgttttggttttgatatggattatacccttgctggagagccagtgtaactccttcaagactggagtgacacacactgcatctgcatctgcctcattgtacaagtccccagagtatgagtcccttggttttgagcttactgtggagagattagtttctattggctatccccaggagttgctcagctttgcttatgattctacattccctaccaggggacttgtctttgacacactgtatggaaatcttttgaaagtcgatgcctatggaaacctcttggtctgtgcacatggatttaactttataaggggaccagaaactagagaacagtatccaaataaatttatccagcgagatgatactgaaagattttacattctgaacacactattcaacctgccagagacctacctgttggcctgcctagtagatttttttactaattgtcccagatataccagttgtgaaacaggatttaaagatggggacctcttcatgtcctaccggagtatgttccaggatgtaagagatgctgttgactgggttcattacaagggctcccttaaggaaaagacagttgaaaatcttgagaagtatgtagtcaaagatggaaaactgcctttgcttctgagccggatgaaaggaagtacgggaaaggtatttcttgcctaaccaacagtggactattaaatattccggtacaattatgacttactgtttgattcccacatggcccaagactgggagctccatcgaccatggcagtcctaaatttgacttgatcttgggtggatgcacggcaaaacagtctttttgggagaaggccacagtactgcgtcaggtggatactaaactgacaggctgaaaattggtacgtacacaagggcctacagcatggatcagatagtcaggagataatatgatcagactggacaggatggaccacaggacaaagatttcataggaaacaattaggacatctacaacaaaacagcaggtacaacattgagtcaaaaaaaacacatatgaaaaccannnnnnnn

SEQ ID NO: 13913 - DNA, 1695 bp, Homo sapiens
ggtgtcgacccacgcgtccgcgctccggcaacgccaaccgctccgctgcgcgcaggctgggctgcaggctctcggctgcagcgttgggtggatctaggatccggcttccaacatgtggcagctctgggcctccctctgctgcctgctggtgttggccaatgcccggagcaggccctctttccatcccgtgtcggatgagctggtcaactatgtcaacaaacggaataccacgtggcaggccgggcacaacttctacaacgtggacatgagctacttgaagaggctatgtggtaccttcctgggtgggcccaagccaccccagagagttatgtttaccgaggacctgaagctgcctgcaagcttcgatgcacgggaacaatggccacagtgtcccaccatcaaagagatcagagaccagggctcctgtggctcctgctgggccttcggggctgtggaagccatctctgaccggatctgcatccacaccaatgcgcacgtcagcgtggaggtgtcggcggaggacctgctcacctgctgtggcagcatgtgtggggacggctgtaatggtggctatcctgctgaagcttggaacttctggacaagaaaaggcctggtttctggtggcctctatgaatcccatgtaggatacaattcctacagcgtctccaatagcgagaaggacatcatggccgagatctacaaaaacggccccgtggagggagctttctctgtgtattcggacttcctgctctacaagtcaggagtgtaccaacacgtcaccggagagatgatgggtggccatgccatccgcatcctgggctggggagtggagaatggcgcaccctactggctggttgccaactcctggaacactgactggggtgacaatggcttctttaaaatactcagaggacaggatcactgtggaatcgaatcagaagtggtggctggaattccacgcaccgatcagtactgggaaaagatctaatctgccgtgggcctgtcgtgccagtcctgggggcgagatcggggtagaaatgcattttattctttaagttcacgtaagatacaagtttcagacagggtctgaaggactggattggccaaacatcagacctgtcttccaaggagaccaagtcctggctacatcccagcctgtggttacagtgcagacaggccatgtgagccaccgctgccagcacagagcgtccttccccctgtagactagtgccgtagggagtacctgctgccccagctgactgtggccccctccgttgatccatccatcttcagggagcaagacagagacgcaggaatggaaagcggagttcctaacaggatgaaacttcccccatcagttcccccagtacctccaaggcatgtagctttccacatttgtcacagaaatcagaggagagaacgttttgggagccctttggaggacgccagtctacctgggcccctgcatgtagaggagtttgcattgtcgcagttgcgctgatcttgtgctcagctggattctataatagaggtttgatttttcgtgcactctgtctatcatgtggttgagtccgtggaacagctggagaactgttgctattttgacagattgctcctgaatggacgccgctcaaaagtgaatccatgtggtcaggagttgtttctgaccaacttatttctactatcaacaggaaa

SEQ ID NO: 13914 - DNA, 836 bp, Homo sapiens
  misc_feature 1, 836: n = A,T,C or G
naccggggccccccctcggaagtcttctagaattaattaacgcgggccttccttcagcataaaagctgatccacaaacaagaggagcaccagacctcctcttggcttcgagatggcttcgccacaccaagagcccaaacctggagacctgattgagattttccgccttggctatgagcactgggccctgtatataggagatggctacgtgatccatctggctcctccaagtgagtaccccgggctggctcctccagtgtcttctcagtcctgagcaacagtgcagaggtgaaacagcttggaccatgagtaccaaccacggcccgtggaggtgatcatcagttctgcgaaggagatggttggtcagaagatgaagtacagtattgtgagcaggaactgtgagcactttgtcacccagctgagatatggcaagtcccgctgtaaacaggtggaaaaggccaaggttgaagtcggtgtggccacggcgcttggaatcctggttgttgctggatgctcttttgcgattaggagataccaaaaaaagcgacagcctgaagcagccacaaaatcctgtgttagaagcagctgtgggggtcccagtggagatgagccccccccatgcctccagcagcctgaccctcgtgccctgtctcaggcgttctctagatcctttcctctgtttccctctctcgctggcaaaagtatgatctaattgaaacaagactgaaggatcaataaacagccatctgccccttcagaaaggacttctaccatgtttttatagacttctgaatcacaaaggaggaaggtaacattgagtgaacactcactgggtan

SEQ ID NO: 13915 - DNA, 547 bp, Homo sapiens
  misc_feature 1, 2, 546, 547: n = A,T,C or G
nncatatgatagtgaaatgatacttaaatgccagtgatgctttgtgtctgtctctcttaatacacgtaagctcccagagggcaagccccatccatgttttattcatatttgtatttaatactttgcaaattttaataccatgaccttgggccatggacatcaccgctggctgctcagtgaatgtgggctgaattgctctatgtatcggtctttgtctcagtcagcttgggctgctatcatcaaatggcatagacagggtggctttaacaactcacatttactttctcacagttctggaggctgtgaagtataagatcagggtgccagcatggttctggtaaattgaagttcatgaaataatgagaccttttataaaagacagtggcataaatacaaaatataccacgaacatttcccttaagaaatgtttcacagagtagcatattggtgtaattacacataagactgattcagcattataattacaaaactgttttcataggattcagtgttaattcaggctctcaatatgttgccaaagtctgnn

SEQ ID NO: 13916 - DNA, 600 bp, Homo sapiens
  misc_feature 600: n = A,T,C or G
ccgggcaggtacgcggggcgcaatcccgatggaataaatctagcacccctgatggtgtgcccacactttgctgccgaaacgaagccagacaacagatttccatcagcaggatgtgggggctcaaggttctgctgctacctgtggtgagctttgctctgtaccctgaggagatactggacacccactgggagctatggaagaagacccacaggaagcaatataacaacaaggtgcctggggtcctggagggggcatggcaggaaggctgagacctgagctctctcatcttagcttccagactcccttcttcaatccaaatgctttattccaagcaaatcagtccctcttccctaactcatgttaacatacggttttcattcctatgcttcaaatcatcctctgtcaaactgtatccttcctttgctttataagtgtgttacatttctcttttgggaagagttctaagattaatgctgttaatctataagcaatttttctgtctctccagaactttgtgtggtatttgtttacatattatctcttcttgcaggctcttaattccatggttagttccccaactaaactgtagacttttatgan

SEQ ID NO: 13917 - DNA, 922 bp, Homo sapiens
  misc_feature 1, 2, 3, 4: n = A,T,C or G
nnnngaacatgaaatgggaagaaagcaaaaagaatcgagtggaaataaatgatttagaccctgaagtttttaaagaaatgatgagattcatttacacagggagagcaccaaaccttgacaaaatggctgacaacttgtgggcagctgcagacaaatatgcactggaacggctgaaggtcatgtgcgaagaagctttgtgtagtaacctctcagtagagaatgttgcagatacccttgtccttgcagatttgcacagtgcagaacagttgaaagcacaagccatagactttattaataggtgcagtgtacttcgacaacttgggtgtaaagatgggaaaaactggaacagcaaccaagcaaccgacataatggaaacatcagggtggaagtccatgattcagtctcaccctcatttagtagcagaagcctttcgagcactagcatctgcacagtgtccacagtttggcattccacgcaaacggctaaaacagtcctgaaatcttccatgaacagttgaaaaatggaattgactttcactcctccaggtccagaaggattctaatacacaaaccataagcaagagttgtttctgttattttgtccacagaacagaagctgaaaaagcatattgcttgcatttcaggtggataatttatggtttattcttcagctttaaattagactgattaattcacttcaaggccttaaattatcttcaatgacttctcttgttcatataatactttaatttttttttattgtgccttgtcattttgaccaaggctatgcaggattgcactagctccataatgcagtaatattgataactgaagatactaagtttcaaaaggatcttccattattttgcaaaaaaaaaaatgaattttaaaaaaaaaaagtacctgcccgggcggccgctcga

SEQ ID NO: 13918 - DNA, 1159 bp, Homo sapiens
  misc_feature 693, 703, 761, 818, 827, 868, 872, 874, 915, 923, 926, 1014,1026, 1029, 1031, 1056, 1067, 1102, 1111, 1119, 1136, 1143,1147, 1159: n = A,T,C or G
actagaggtaaatttttaataacatactaatgtgaaatggtatctggtttttattcagactttttgtgagcatattcttatagacactagaaataaatacatagaaggagactttgagcacaagggagaagagagttattagcactcctgaggcctctggaatgctgcttttctatccaggtatcttgcttgctaccagcagaattgactggtattggttctcactggccagggagcctctgctctgttcctggaatataaggcttttattcaggagcaaatcattgatagtaactttgctttatctagccattgacttcagcaggctaaaactacattgtgtaactgactgttcaaaagaataagtaaattttttttaatctaattcccttatggaaagcaccttgctctatggcactttccagatcttttgggattttgtgcttaattatacatacatacaccaaaatcacaatagaaagatatgaagcctttaattttagactctgaaagataactgggtgatcctttgtgttaaaattgtgatacaaacaaccattgtataataccaatatgaatcgaactgtagagctttgacagctatgattactgcaggtagaggacgattcattcgttagcatatagccataagtgaaaattggatgataatgcatgagctcatatgcattcganctacacagcntgcaatcagagtggcatatagtatatatacagtatttagataccttctatgatagacncaaatccgatgtatcagtgcattggtatcagcagtacatgctgacatgctgagccangagcatagntatatataaggtagtgtgagatctatacacttagctgtgangcancnatgatgcatgcatgcatatgctgcatgcatccagatgtacntacatatnacnatgctgatgctagtctatgctcatcccaatcaatgatgcattgtactagatgcatgctacgggacatgagcatgtgaaaacgtgatantagtctggtacntcnanactaaaatatactggcgagtccccntgtggtaatcntgcagcgcgttacgtgtctgaccgtgtcacatacntggatcatncgcctgancgatgctcctcgctcangtgcggncgangtgcgttggtgn

SEQ ID NO: 13919 - DNA, 672 bp, Homo sapiens
  misc_feature 1, 2, 3, 4, 5: n = A,T,C or G
nnnnngggaggccaaggcaggtggatcaactgaggtcaggagtttgagaccagcctagctaatgtagtgaaatcctgtctctactaaaaatacaaaaattagctgggtgtggtggtgcatgcctgtaatcccagctactcaggaggctgaggcaggagaattactggaactcaagaggcagagactgcagtgagccaagatcgtgccatggcactcctgcctggacaacagagcaagactccatccttaagctccctgacttgctgctcgtcctttctctggcaaaatctcatccttggatgagcccgacttcgtgtttgctcaatgacaccactcacctgaaccagaaaaaataatcaaaaagtggtcagagatatcatcataaattcaaattacttacataaaaaattggccctaaatgtttccagaaatcaataaaagttttgtttctccaaagacatcatttcttcagaaacccaacgtgtataacctattttttctatgttcttctaacattcattcaacttctctcatctgatatcttgccaaatcactcaaagagaaaatatatcccattaggcaagagccgaccatattcccatcacctgagaaaatcatatgcacaggatgcgcccacctcacctttctctgcctcatcatgtcagaaaaagt

SEQ ID NO: 13920 - DNA, 2549 bp, Homo sapiens
gcgtccgcttgtctgaggcggaggcagccccgcgccgcgccggacccgagcatatttcattttctgtcattggactttgagccattagaaccatgagcaactacagtgtgtcactggttggcccagctccttggggtttccggctgcagggcggtaaggatttcaacatgcctctgacaatctctagtgctggagtgcagtggcgcaatctcggctcaccacaacctccatctcccgagttcaagcgattctcctgcctcagcctcccgagtagctgggactacaggcacgccccaccatgcccagctcatttttgtatttttagtagagacagggtttcaccatgttggccaggatgatcttgatctcttgacctcatgatccgcccctcttggcctcccaaagtgctgggatcacaggcgtgagccaccacacctggccctctatttattctctttaaagagagagaaaactatgagaggccaaaattatttaattaaatctttaccttagcacaagggaaaaaatggaatttgcctaatataggtgatgaagcatacacaatgaacagaaacaatcacattttagtaaaaggcaaaaatttgagacttataagctatatggtagcttatttttgggtggggaagaaatgagaaaagaatataacatctcttaccggcatgacacattttgataaaaaatcttattgtcctttcctactagaatgatccactgtaaggcaaaaataatatacaagcaaagtttttttttggagacggagtctcactctgtcacccaggctggagtgcagtggtacgatcttggctcactgcaacctctccctcccgggttcaagtgattctcgtgcctcagcctcttgagtagctgggattacaggcgcgtgccactgcgtccggctaatttttgtatttttagtagagatggggtttcaccatgttggccaggctgatctcaaactcctgacctcatgtggtccacccaccttggcctcccaaagtgctgggattacaggcgtgagccaccacgctcagcctacaagcaattttttaaaaactgacacctattactgataaaattctctgtttaaaatcctatttactattttaaagataagtattagttttttttaaatacaataattctgttattgataaaatttaaggcattttcattgccttttgcagatttactcataactacctaacaaggaaagaaggtataattatttcagattggattatttattctaaaattaaattcttcactaatttattctaagatgaatttaatagtccatcaggaaattggtttttataaagcttattttatgggcataaaatacaggaaaaagtaataataaatgccaaaccgtctctttactttatgaagccaaatatttcctcagacttggtttttaaagctggaatttattccttcagggccactattatttttcaaaactccatataaatattgaatctaaaaattaattagtaattttaattttcctttttctcttcaaattccttctcttctcctgaactgctgactttcaaaaattcacagaatgagcatgtttcttacacaggggcttgcccttcttggagaaaaaggtctgaccttccaaactttcacaacacactgagcatacaaagcaagtgtcatgccaggtgtagcccagagcttccaggaacatgtcaccagcttctatgggaaattcacatccatggcataataatcagtctcacagtagggttcaccatcctccaagtgaaaaacattgttccgaatgggctttccacaggctacacacacaaaacaggaaacatgccaagtttgtttcaacgcattgatgacttctccaaggatcttcctttggcatcgaccacattcaggggcaaagaatttctcatagcacagctcccaatacagggctcctttctcctctacaaatccaatgtaggccattgtatttttgcagtgagcgcagttgaattcttctgggtgccaagatttccccagtgccactaagaatggtcctctgacagaaaaaaaagaggccaactaagtttgagaataaaatttctagagttagcctggatatggacctcttttatgcaatgtccaaccaattaaatacttgctcaattttccttcttaaggactgaactcatgggtgttgggtgttgtaaattcacagagggactctgcattccccgcgtactgaatgataaaaatgtaacatgttatacatttaactttattctagtagccacattttaaaagttaaaaagtataatattttacttaacccaatatatccaaaacatgtaatcccaacatataatataaaaatatttaacattttaaaaataccaattctttgaaatcttgtatatattttatactcagaacacttctcatttcagactacccacatttcaaaggccctgtttcttatggataaaaaatgctttgtagggcaaagcagcacgttgacagatatctacttaaacagaaattatggt

SEQ ID NO: 13921 - DNA, 2111 bp, Homo sapiens
  misc_feature 1922, 1923, 1924, 1925, 1926, 1927, 1928, 1929, 1930, 1931,1932, 1933, 1934, 1935, 1936, 1937, 1938, 1939, 1940, 1941,1942, 1943, 1944, 1945, 1946, 1947, 1948, 2007, 2096, 2110,2111: n = A,T,C or G
tcaactcggaaaaagggtaacaacgccggaaagtagactcaccgtcttggtctagagactgacccctgcacagacagaccccttcccctctctgcgaaaggaccaagccccagaagtcactccatctcctacggctcgcaatttccagaggccccctggcaccttccagcctgatgtcgtgcgtcaagttatggcccagcggtgcccccgcccccttggtgtccatcgaggaactggagaaccaggagctcgtcggcaaaggcgggttcggcacagtgttccgggcgcaacataggaagtggggctacgatgtggcggtcaagatcgtaaactcgaaggcgatatccagggaggtcaaggccatggcaagtctggataacgaattcgtgctgcgcctagaaggggttatcgagaaggtgaactgggaccaagatcccaagccggctctggtgactaaattcatggagaacggctccttgtcggggctgctgcagtcccagtgccctcggccctggccgctcctttgccgcctgctgaaagaagtggtgcttgggatgttttacctgcacgaccagaacccggtgctcctgcaccgggacctcaagccatccaacgtcctgctggacccagagctgcacgtcaagctggcagattttggcctgtccacatttcagggaggctcacagtcagggacagggtccggggagccagggggcaccctgggctacttggccccagaactgtttgttaacgtaaaccggaaggcctccacagccagtgacgtctacagcttcgggatcctaatgtgggcagtgcttgctggaagagaagttgagttgccaaccgaaccatcactcgtgtacgaagcagtgtgcaacaggcagaaccggccttcattggctgagctgccccaagccgggcctgagactcccggcttagaaggactgaaggagctaatgcagctctgctggagcagtgagcccaaggacagaccctccttccaggaatgcctaccaaaaactgatgaagtcttccagatggtggagaacaatatgaatgctgctgtctccacggtaaaggatttcctgtctcagctcaggagcagcaataggagattttctatcccagagtcaggccaaggagggacagaaatggatggctttaggagaaccatagaaaaccagcactctcgtaatgatgtcatggtttctgagtggctaaacaaactgaatctagaggagcctcccagctctgttcctaaaaaatgcccgagccttaccaagaggagcagggcacaagaggagcaggttccacaagcctggacagcaggcacatcttcagattcgatggcccaacctccccagactccagagacctcaactttcagaaaccagatgcccagccctacctcaactggaacaccaagtcctggaccccgagggaatcagggggctgagagacaaggcatgaactggtcctgcaggaccccggagccaaatccagtaacagggcgaccgctcgttaacatatacaactgctctggggtgcaagttggagacaacaactacttgactatgcaacagacaactgccttgcccacatggggcttggcaccttcgggcaaggggaggggcttgcagcaccccccaccagtaggttcgcaagaaggccctaaagatcctgaagcctggagcaggccacagggttggtataatcatagcgggaaataaagcaccttccaagcttgcctccaagagttacgagttaaggaagagtgccaccccttgaggcccctgacttccttctagggcagtctggcctgcccacaaactgactttgtgacctgtcccccaggagtcaataaacatgatggaatgctaaaaaaaaaaaaaaaaaaaaaaaaaaaaaaaaaaaaaaaaaannnnnnnnnnnnnnnnnnnnnnnnnnngaaaaaactctcccacactctccccctgaaccctgaaacatataaatgaatgcaattgnttgcttgttaaacttgtttaattgcacgcttataactggttacaacataaagcaatatgcatcacacaatttcacaaataaaagcattntttttcaactgcann

SEQ ID NO: 13922 - DNA, 1841 bp, Homo sapiens
attaattaaggcgggggcggaggaagccgcagataactttttttgtctttgaaagatagagattaatacaactacttaaagaatatagtcaataggttactaagatattgcttagcgttaagtttttaacgtaattttaatagcttaagattttaagagaaaatatgaagacttagaagagtagcatgaggaaggaaaagataaaaggtttctaaaacatgacggaggttgagatgaagcttcttcatggagtaaaaaatgtatttaaaagaaaattgagagaaaggactacagagccccgaattaataccaatagaagggcaatgcttttagattaaaatgaaggtgacttaaacagcttaaagtttagtttaaaagttgtaggtgattaaaataatttgaaggcgatcttttaaaaagagattaaaccgaaggtgattaaaagaccttgaaatccatgacgcagggagaattgcgtcatttaaagcctagttaacgcatttactaaacgcagacgaaaatggaaagattaattgggagtggtaggatgaaacaatttggagaagatagaagtttgaagtggaaaactggaagacagaagtacgcggggcggcggggggggggcaggcggagcttgaggaaaccgcagataagtttttttctctttgaaagatagagattaatacaactacttaaaaaatatagtcaataggttactaagatattgcttagcgttaagtttttaacgtaattttaatagcttaagattttaagagaaaatatgaagacttagaagagtagcatgaggaaggaaaagataaaaggtttctaaaacatgacggaggttgagatgaagcttcttcatggagtaaaaaatgtatttaaaagaaaattgagagaaaggactacagagccccgaattaataccaatagaagggcaatgcttttagattaaaatgaaggtgacttaaacagcttaaagtttagtttaaaagttgtaggtgattaaaataatttgaaggcgatcttttaaaaagagattaaaccgaaggtgattaaaagaccttgaaatccatgacgcagggagaattgcgtcatttaaagcctagttaacgcatttactaaacgcagacgaaaatggaaagattaattgggagtggtaggatgaaacaatttggagaagatagaagtttgaagtggaaaactggaagacagaagtacgggaaggcgaagaaaagaatagagaagatagggaaattagaagataaaaacatacttttagaagaaaaaagataaatttaaacctgaaaagtaggaagcagaagaaaaaaagacaagctaggaaacaaaaagctaagggcaaaatgtacaaacttagaagaaaattggaagatagaaacaagatagaaaatgaaaatattgtcaagagtttcagatagaaaatgaaaaacaagctaagacaagtattggagaagtatagaagatagaaaaatataaagccaaaaattggataaaatagcactgaaaaaatgaggaaattattggttaccaatagaagggcaatgcttttagattaaaatgaaggtgacttaaacagcttaaagtttagtttaaaagttgtaggtgattaaaataatttgaaggcgatcttttaaaaagagattaaaccgaaggtgattaaaagaccttgaaatccatgacgcagggagaattgcgtcatttaaagcctagttaacgcatttactaaacgcagacgaaaatggaaagattaattgggagtggtaggatgaaacaatttggagaagatagaagtttgaagtggaaaactggaagacagaagt

SEQ ID NO: 13923 - DNA, 3070 bp, Homo sapiens
  misc_feature 3063, 3064, 3065, 3066, 3067, 3068, 3069, 3070: n = A,T,C or G
tccgctccgtaggcagccaacgcggccaccccgcggcaggtgcccgacatggcgagtgtagtgctgccgagcggatcccagtgtgcggcggcagcggcggcggcggcgcctcccgggctccggctccggcttctgctgttgctcttctccgccgcggcactgatccccacaggtgatgggcagaatctgtttacgaaagacgtgacagtgatcgagggagaggttgcgaccatcagttgccaagtcaataagagtgacgactctgtgattcagctactgaatcccaacaggcagaccatttatttcagggacttcaggcctttgaaggacagcaggtttcagttgctgaatttttctagcagtgaactcaaagtatcattgacaaacgtctcaatttctgatgaaggaagatacttttgccagctctataccgatcccccacaggaaagttacaccaccatcacagtcctggtcccaccacgtaatctgatgatcgatatccagaaagacactgcggtggaaggtgaggagattgaagtcaactgcactgctatggccagcaagccagccacgactatcaggtggttcaaagggaacacagagctaaaaggcaaatcggaggtggaagagtggtcagacatgtacactgtgaccagtcagctgatgctgaaggtgcacaaggaggacgatggggtcccagtgatctgccaggtggagcaccctgcggtcactggaaacctgcagacccagcggtatctagaagtacagtataagcctcaagtgcacattcagatgacttatcctctacaaggcttaacccgggaaggggacgcgcttgagttaacatgtgaagccatcgggaagccccagcctgtgatggtaacttgggtgagagtcgatgatgaaatgcctcaacacgccgtactgtctgggcccaacctgttcatcaataacctaaacaaaacagataatggtacataccgctgtgaagcttcaaacatagtggggaaagctcactcggattatatgctgtatgtatacgatccccccacaactatccctcctcccacaacaaccaccaccaccaccaccaccaccaccaccaccatccttaccatcatcacagattcccgagcaggtgaagaaggctcgatcagggcagtggatcatgccgtgatcggtggcgtcgtggcggtggtggtgttcgccatgctgtgcttgctcatcattctggggcgctattttgccagacataaaggtacatacttcactcatgaagccaaaggagccgatgacgcagcagacgcagacacagctataatcaatgcagaaggaggacagaacaactccgaagaaaagaaagagtacttcatctagatcagcctttttgtttcaatgaggtgtccaactggccctatttagatgataaagagacagtgatattggaacttgcgagaaattcgtgtgtttttttatgaatgggtggaaaggtgtgagactgggaaggcttgggatttgctgtgtcaaaaaaaaaaaaaaaatgtcctttggaaagtacactctgctggttgacacctcttttttcgtgtggtcggtcgtgtaatgcttatttcttcctaccacgtcaaacttggatacttggatccagtttcagtagattgcagaaaattctgtgccttgttttttgtttgtttgttgcgttcctttcttttccccctttgtgcacatttatttcctccctctaccccaatttcggattttttccaaaatctcccattttggaatttgcctgctgggattccttagactcttttccttcccttttctgttctagttttttacttttgtttatttttatggtaactgctttctgttccaaattcagtttcataaaaggagaaccagcacagcttagatttcatagttcagaatttagtgtatccataatgcattcttctctgttgtcgtaaagatttgggtgaacaaacaatgaaaactctttgctgctgcccatgtttcaaatacttagagcagtgaagactagaaaattagactgtgattcagaaaatgttctgtttgctgtggaactacattactgtacagggttatctgcaagtgaggtgtgtcacaatgagattgaatttcactgtctttaattctgtatctgtagacggctcagtatagataccctacgctgtccagaaaggtttggggcagaaaggactcctcctttttccatgccctaaacagacctgacaggtgaggtctgttccttttatataagtggacaaattttgagttgccacaggaggggaagtagggaggggggaaatacagttctgctctggttgtttctgttccaaatgattccatccacctttcccaatcggccttacttctcactaatttgtaggaaaaagcaagttcgtctgttgtgcgaatgactgaatgggacagagttgattttttttttttttcctttgtgcttagttaggaaggcagtaggatgtggcctgcatgtactgtatattacagatatttgtcatgctgggatttccaactcgaatctgtgtgaaactttcattccttcagatttggcttgacaaaggcaggaggtacaaaagaagggctggtattgttctcacactggtctgctgtcgctctcagttctcgataggtcagagcagaggtggaaaaacagcatgtacggattttcagttacttaatcaaaactcaaatgtgagtgtttttatctttttacctttcatacactagccttggcctctttcctcagccttaagaaccatctgccaaaaattactgatcctcgcatgatggcagccatagtgcatagctactaaaatcagtgaccttgaacatatcttagatggggagcctcgggaaaaggtagaggagtcacgttaccatttacatgttttaaagaaagaagtgtggggattttcactgaaacgtctaggaaatctagaagtagtcctgaaggacagaaactaaactcttaccatatgtttggtaagactccagactccagctaacagtccctannnnnnnn

SEQ ID NO: 13924 - DNA, 600 bp, Homo sapiens
  misc_feature 1, 2, 3, 4, 5, 6, 7, 8, 9, 10, 11, 12, 13, 28, 594, 595,596, 597, 598, 599, 600: n = A,T,C or G
nnnnnnnnnnnnncgaaatacttctagnattaattaacgcggggggggaagccatctgccttcgagcctgccactgaaatgcaaaagtctgtcccaaataaagccttggaattgaaaaatgaacaaacattgagagcagatgagatactcccatcagaatccaaacaaaaggactatgaagaaaattcttgggatactgagagtctctgtgagactgtttcacagaaggatgtgtgtttacccaaggctgcgcatcaaaaagaaatagataaaataaatggaaaattagaagggtctcctgttaaagatggtcttctgaaggctaactgcggaatgaaagtttctattccaactaaagccttagaattgatggacatgcaaactttcaaagcagagcctcccgagaagccatctgccttcgagcctgccattgaaatgcaaaagtctgttccaaataaagccttggaattgaagaatgaacaaacattgagagcagatgagatactcccatcagaatccaaacaaaaggactatgaagaaagttcttgggattctgagagtctctgtgagactgtttcacagaaggatgtgtgnnnnnnn

SEQ ID NO: 13925 - DNA, 3069 bp, Homo sapiens
agtcgaccacgcgtccggggaaccccaggcgcgagcgggaagaggggacctgcagccacaacttctctggtcctctgcatcccttctgtccctccacccgtccccttccccaccctctggcccccaccttcttggaggcgacaacccccgggaggcattagaagggatttttcccgcaggttgcgaagggaagcaaacttggtggcaacttgcctcccggtgcgggcgtctctcccccaccgtctcaacatgcttaggggtccggggcccgggctgctgctgctggccgtcctgtgcctggggacagcggtgccctccacgggagcctcgaagagcaagaggcaggctcagcaaatggttcagccccgggctgctgctgctggccgtcctgtgcctggggaccccgctaaactcttccaccattattgggtaccgcatcacagtagttgcggcaggagaaggtatccctatttttgaagattttgtggactcctcagtaggatactacacagtcacagggctggagccgggcattgactatgatatcagcgttatcactctcattaatggcggcgagagtgcccctactacactgacacaacaaacggctgttcctcctcccactgacctgcgattcaccaacattggtccagacaccatgcgtgtcacctgggctccacccccatccattgatttaaccaacttcctggtgcgttactcacctgtgaaaaatgaggaagatgttgcagagttgtcaatttctccttcagacaatgcagtggtcttaacaaatctcctgcctggtacagaatatgtagtgagtgtctccagtgtctacgaacaacatgagagcacacctcttagaggaagacagtcttttactgtgcactggattgctcctcgagccaccatcactggctacaggatccgccatcatcccgagcacttcagtgggagacctcgagaagatcgggtgccccactctcggaattccatcaccctcaccaacctcactccaggcacagagtatgtggtcagcatcgttgctcttaatggcagagaggaaagtcccttattgattggccaacaatcaacagtttctgatgttccgagggacctggaagttgttgctgcgacccccaccagcctactgatcagctgggatgctcctgctgtcacagtgagatattacaggatcacttacggagaaacaggaggaaatagccctgtccaggagttcactgtgcctgggagcaagtctacagctaccatcagcggccttaaacctggagttgattataccatcactgtgtatgctgtcactggccgtggagacagccccgcaagcagcaagccaatttccattaattaccgaacagaaattgacaaaccatcccagatgcaagtgaccgatgttcaggacaacagcattagtgtcaagtggctgccttcaagttcccctgttactggttacagagtaaccaccactcccaaaaatggaccaggaccaacaaaaactaaaactgcaggtccagatcaaacagaaatgactattgaaggcttgcagcccacagtggagtatgtggttagtgtctatgctcagaatccaagcggagagagtcagcctctggttcagactgcagtaaccactattcctgcaccaactgacctgaagttcactcaggtcacacccacaagcctgagcgcccagtggacaccacccaatgttcagctcactggatatcgagtgcgggtgtgacctgagtgaacttcaggtcagttggtgcaggaatagtggttactgcagtctgaaccagaggctgactctctccgcttggattctgagcatagacactaaccacatactccactgtgggctgcaagccttcaatagtcatttctgtttgatctggacctgcagttttagtttttgttggtcctggtccatttttgggagtggtggttactctgtaaccagtaacaggggaacttgaaggcagccacttgacactaatgctgttgtcctgaacatcggtcacttgcatctgggatggtttgtcaatttctgttcggtaattaatggaaattggcttgctgcttgcggggctgtctccacggccagtgacagcatacacagtgatggtataatcaactccaggtttaaggccgctgatggtagctgtagacttgctcccaggcacagtgaactcctggacagggctatttcctcctgtttcaccgtaaagtgatcctgtaatatctctctgtaacaaacaagatacatcccagctgatcagtaggctggtgggggtcgcagcaacaacttccaggtccctcggaacatcagaaactgttgattgttggccaatcaataagggactttcctctctgccattaagagcaacgatgctgaccacatactctgtgcctggagtgaggttggtgagggtgatggaattccgagagtggggcacccgatcttctcgaggtctcccactgaagtgctcgggatgatggcggatcctgtagccagtgatggtggctcgaggagcaatccagtgcacagtaaaagagttggcagtaatatcagaaaagtcaatgccagttgggaaatcaagacctgttttctgtcttcctctaagaggtgtgctctcatgttgttcgtagacactggagacactcactacatattctgtaccaggcaggagatttgttaagaccactgcattgtctgaaggagaaattgacaactctgcaacatcttcctcatttttcacaggtgagtaacgcaccaggaagttggttaaatcaatggatgggggtggagcccaggtgacacgcatggtgtctggaccaatgttggtgaatcgcaggtcagtgggaggaggaacagctgggatgatggtatcagagatagggacactttccttgtcatccttgacagtgtaaacactgacattgtactccaggccgggactcaggttatcaaaagtgcaggagctctgatcagcatggaccacttcttcccaaagagcggccgcgaattccagcacacggcggccgttatag

SEQ ID NO: 13926 - DNA, 766 bp, Homo sapiens
  misc_feature 1, 2, 761, 762, 763, 764, 765, 766: n = A,T,C or G
nncgtccggtaagcattttgaaagctttctttcctgttgctcttctaaatgaattcagcctgtcagccatctttgctgcccccttctctaggtggactgccttgggctttgccctgctggttccaactggttattattaggaggttggaggccctgtgggctggattgacagcagtgagtttgctgggttctgcagcagttggttcaagtcaacagcgactcacgagcgttttggatctgtgtactgcaattcccataaagagataggtgtgttatgctgtgtttatgtagtgggtattgttttaaacaccgtacggtttatgcctatgcctttatatttctaatgaaacagttttgttcagcccatgactttgtgcatgactgtcgtccgttctagtcacctgtgctctccatctactgccttttaaagctgcgtcatgagaaggatctacacgttccaccatgactctcgtttcttgccacaagtagaagaaatggttgattctttgcttttcggttaggccgttaaacaaaactcagtcacacccctcccttccaccctcaaactgtgatcacgtggctgttcttgtagtttaaccagggcaacactatatattccaggtctatacattgctgaggtctttttctggttgttcatgtatcagtgttttcaatcgactgcatggaaaacattaaagtcctaagtcatctaagccaaaaaaaaaaaaaaaaagggcggccgctctagagtatccctcgannnnnn

SEQ ID NO: 13927 - DNA, 2209 bp, Homo sapiens
cactagtaacggccgccgtgtgctggaattcgcggccgcgcagagcacagcatcgtcgggaccagactcgtctcaggccagttgcagccttctcagccaaacgccgaccaaggaaaactcactaccatgagaattgcagtgatttgcttttgcctcctaggcatcacctgtgccataccagttaaacaggctgattctggaagttctgaggaaaagcagctttacaacaaatacccagatgctgtggccacatggctaaaccctgacccatctcagaagcagaatctcctagccccacagacccttccaagtaagtccaacgaaagccatgaccacatggatgatatggatgatgaagatgatgatgaccatgtggacagccaggactccattgactcgaacgactctgatgatgtagatgacactgatgattctcaccagtctgatgagtctcaccattctgatgaatctgatgaactggtcactgattttcccacggacctgccagcaaccgaagttttcactccagttgtccccacagtagacacatatgatggccgaggtgatagtgtggtttatggactgaggtcaaaatctaagaagtttcgcagacctgacatccagtaccctgatgctacagacgaggacatcacctcacacatggaaagcgaggagttgaatggtgcatacaaggccatccccgttgcccaggacctgaacgcgccttctgattgggacagccgtgggaaggacagttatgaaacgagtcagctggatgaccagagtgctgaaacccacagccacaagcagtccagattatataagcggaaagccaatgatgagagcaatgagcattccgatgtgattgatagtcaggaactttccaaagtcagccgtgaattccacagccatgaatttcacagccatgaagatatgctggttgtagaccccaaaagtaaggaagaagataaacacctgaaatttcgtatttctcatgaattagatagtgcatcttctgaggtcaattaaaaggagaaaaaatacaatttctcactttgcatttagtcaaaagaaaaaatgctttatagcaaaatgaaagagaacatgaaatgcttctttctcagtttattggttgaatgtgtatctatttgagtctggaaataactaatgtgtttgataattagttagtttagtttgtggcttcatggaaactccctgtaaactaaaagcttcagggttatgtctatgtctatgttcattctatagaagaaatgcaaactatcactgtattttaatatttgttattctctcatgaatagaaatttatgtagaagcaaacaaaatacttttacccacttaaaaagagaatataacattttatgtcactataatcttttgttttttaagttagtgtatattttgttgtgattatctttttgtggtgtgaataaatcttttatcttgaatgtaataagaatttggtggtgtcaattgcttatttgttttcccacggttgtccagcaattaataaaacataacctttttttactgcctaaaaaaaaaaaaaaaaaaaaaaaaaaaaaaaaaaaaaaaaaaaaaaaaaagaggggggagagcgagcccaaaaagaaaccgaggaggggcgcacaagaagggcaccaccgatgctggcaaaaggggcgcccaaaaagggagggcaaaataaaaagaacgagcccgcgtggccgccaggctactattctaccaaacaaacgcccccagaaacgaaagtggggcgacaaaacacggagcggacaaaccacgtaggggccaacatcccactgtgaggagagaaatgagagacacacactatacacctttcttgtgggggcggaaggacaccaacactactggcgggacacaaaaattccccacaacagacagacacgcaagcggaacaaacactaatcactcaacacaaccaccgcagccgcccccacatagcaggcgggacgacgaccacactcatactagccagacaacaacctgtaccaaacaagaggcggcggctgatatcaaacagcgggcgggggacaaaacaccacaaacacaaggcgaggcggagcaaataagcgtagcccgcgagcgcgacggagcgaagaagaaaaaacaaagaatgcgcgggcgccacacaacgcagcagggaggcgaagcacaaatagagacagcc

SEQ ID NO: 13928 - DNA, 4400 bp, Homo sapiens
acgcgggggagtgtgtgtgagtgcatgggagggtgctgaatattccgagacactgggaccacagcggcagctccgctgaaaactgcattcagccagtcctccggacttctggagcggggacagggcgcagggcatcagcagccaccagcaggacctgggaaatagggattcttctgcctccacttcaggttttagcagcttggtgctaaattgctgtctcaaaatgcagaggatctaatttgcagaggaaaacagccaaagaaggaagaggaggaaaaggaaaaaaaaaggggtatattgtggatgctctacttttcttggaaatgcaaaagattatgcatatttctgtcctcctttctcctgttttatggggactgatttttggtgtctcttctaacagcatacagataggggggctatttcctaggggcgccgatcaagaatacagtgcatttcgagtagggatggttcagttttccacttcggagttcagactgacaccccacatcgacaatttggaggtggcaaacagcttcgcagtcactaatgctttctgctcccagttttcgagaggagtctatgctatttttggattttatgacaagaagtctgtaaataccatcacatcattttgcggaacactccacgtctccttcatcactcccagcttcccaacagatggcacacatccatttgtcattcagatgagacccgacctcaaaggagctctccttagcttgattgaatactatcaatgggacaagtttgcatacctctatgacagtgacagaggcttatcaacactgcaagctgtgctggattctgctgctgaaaagaaatggcaagtgactgctatcaatgtgggaaacattaacaatgacaagaaagatgagatgtaccgatcactttttcaagatctggagttaaaaaaggaacggcgtgtaattctggactgtgaaagggataaagtaaacgacattgtagaccaggttattaccattggaaaacacgttaaagggtaccactacatcattgcaaatctgggatttactgatggagacctattaaaaatccagtttggaggtgcaaatgtctctggatttcagatagtggactatgatgattcgttggtatctaaatttatagaaagatggtcaacactggaagaaaaagaataccctggagctcacacaacaacaattaagtatacttctgctctgacctatgatgccgttcaagtgatgactgaagccttccgcaacctaaggaagcaaagaattgaaatctcccgaagggggaatgcaggagactgtctggcaaacccagcagtgccctggggacaaggtgtagaaatagaaagggccctcaaacaggttcaggttgaaggtctctcaggaaatataaagtttgaccagaatggaaaaagaataaactatacaattaacatcatggagctcaaaactaatgggccccggaagattggctactggagtgaagtggacaaaatggttgttacccttactgagctcccttctggaaatgacacctctgggcttgagaataagactgttgttgtcaccacaattttggaatctccgtatgttatgatgaagaaaaatcatgaaatgcttgaaggcaatgagcgctatgagggctactgtgttgacctggctgcagaaatcgccaaacattgtgggttcaagtacaagttgacaattgttggtgatggcaagtatggggccagggatgcagacacgaaaatttggaatgggatggttggagaacttgtatatgggaaagctgatattgcaattgctccattaactattacccttgtgagagaagaggtgattgacttctcaaagcccttcatgagcctcgggatatctatcatgatcaagaagcctcagaagtccaaaccaggagtgttttcctttcttgatcctttagcctatgagatctggatgtgcattgtttttgcctacattggggtcagtgtagttttattcctggtcagcagatttagcccctacgagtggcacactgaggagtttgaagatggaagagaaacacaaagtagtgaatcaactaatgaatttgggatttttaatagtctctggttttccttgggtgcctttatgcggcaaggatgcgatatttcgccaagatccctctctgggcgcattgttggaggtgtgtggtggttctttaccctgatcataatctcctcctacacggctaacttagctgccttcctgactgtagagaggatggtgtctcccatcgaaagtgctgaggatctttctaagcaaacagaaattgcttatggaacattagactctggctccactaaagagtttttcaggagatctaaaattgcagtgtttgataaaatgtggacctacatgcggagtgcggagccctctgtgtttgtgaggactacggccgaaggggtggctagagtgcggaagtccaaagggaaatatgcctacttgttggagtccacgatgaacgagtacattgagcaaaggaagccttgcgacaccatgaaagttggtggaaacctggattccaaaggctatggcatcgcaacacctaaaggatcctcattaagaaccccagtaaatcttgcagtattgaaactcagtgagcaaggcgtcttagacaagctgaaaaacaaatggtggtacgataaaggtgaatgtggagccaaggactctggaagtaaggaaaagaccagtgccctcagtctgagcaacgttgctggagtattctacatccttgtcgggggccttggtttggcaatgctggtggctttgattgagttctgttacaagtcaagggccgaggcgaaacgaatgaaggtggcaaagaatgcacagaatattaacccatcttcctcgcagaattcacagaattttgcaacttataaggaaggttacaacgtatatggcatcgaaagtgttaaaatttaggggatgaccttgaatgatgccatgaggaacaaggcaaggctgtcaattacaggaagtactggagaaaatggacgtgttatgactccagaatttcccaaagcagtgcatgctgtcccttacgtgagtcctggcatgggaatgaatgtcagtgtgactgatctctcgtgattgataagaaccttttgagtgccttacacaatggttttcttgtgtgtttattgtcaaagtggtgagaggcatccagtatcttgaagacttttctttcagccaagaattcttaaatatgtggagttcatcttgaattgtaaggaatgattaattaaaacacaacatctttttctactcgagttacagacaaagcgtggtggacatgcacagctaacatggaagtactataatttacctgaagtctttgtacagacaacaaacctgtttctgcagccactattgttagtctcttgattcataatgacttaagcacacttgacatcaactgcatcaagatgtgacatgttttataaaaaaaggaaaaaaaacatttaaaactaaaaaatatttttaggtattttcacaaacaaactggcttttaaataaatttgcttccatattggttgaataagacaaaaacaattaaactgagtgggaagtgaataaaaaaaggctttaggtatcgattccatatttttcaaagccaaatatgtaaatgctaaggaaagtaaacaaagaggagattccaatcttgtaatttaatattgttattaaaactttaatgtatcctattctttaacatttggtgttaatataaaattacttggcaatgcttgacatttgaaataaacatttttctattgttttattgcaagtggtccaattaattttgcttagctacagtttggtcataaatcaagtgagtttaaagacactaccaagttgttaggtgcccagagaaaatttctcccttttaaaaaggccaggtgatttttcaaatgtaatcttgcccccaaagtaatatccgaatatctttttgacatgtctaaatatatatatatataaagaaatatttgttaacacaaaagcatttgatctatgtagataaatgctaatagatttaaaaagctaatattaacaaataccagaatacgtgaagttccatttttaaagtgtttgagcttacagaagagaaacattcattttaaatgaagtaaaaaatgccttgaaagtaattctttagatagttgcccattgattaaattccaaaaactaaatatgtttttagctttaaaattataaaagctgtcataaactttatatattatgaattttaaaatatgtttgagtctcctgcaatatagtttcatcccattgacatcaattaaaaataaccctaatatattatttttatatttattcctcaggtggaatgga

SEQ ID NO: 13929 - DNA, 2254 bp, Homo sapiens
  misc_feature 1200: n = A,T,C or G
gcgtccgacccactactatcggaccagccacccttactgatctttgtccctccctctttagctaacagtgcccccgacaggcaccaataaatgccctatttttttccctgtgtctcccaagagaaaaagtaaatttcagattgtgttccccctcctagcgccagagaaaggaactacaacaaagcctagctgctgagtccagagcgcacagcacagtcgccctcccagctcttccgtcggccgggaggagtctcctttgctcttgtctactgctggagctgctaataaagtttcattcgaatacttgagctgccgcgccctgcgtttccctcatgagcttcttccgcccgcaacacgagactcagcaccacacaatcagcgtggcaaagcctgaagggcgggacaggaagtgaggtcactcctcaccggggtgaaagaaatgggcaagttcatgaaacctgggaaggtggtgcttgtcctggctggacgctactccggacgcaaagctgtcatcgtgaagaacattgatgatggcacctcagatcgcccctacagccatgctctggtggctggaattgaccgctacccccgcaaagtgacagctgccatgggcaagaagaagatcgccaagagatcaaagataaaatcttttgtgaaagtgtataactacaatcacctaatgcccacaaggtactctgtggatatccccttgggacaaaactgtcgtcaataaggatgtcttcagagatcctgctcttaaacggcaaggcccgacgggaggccaaggtcaagtttgaagagagatacaagacaggcaagaacaagtggttcttccagaaactgcggttttagatgctttgttttgatcatttatgcaatttgtagcacaacaaccagatctcacagacgaacacaaaaactgttgtgggccgactagggcccagtaaaaagtttctacaacaactgtgtgggcccgcggcccatagtataggaacggtgccacggctccaagaaaccggctagaaggggtgttcccccaaaaaaccgcgggaccggcgttgacaaccaaggcgttgggcactggcctcaagagcaggacgtaaaccacgcgccacggtgcggaccaacctcaacacactcatgcaactcacaacgcaaacaaaccaaacatcaagcaagcaacgcaccgcatcagatacnaccacagctacaaagctagcatgtacagccacagcagccacccaacacacgcagaacaacaaaaatacaacgagacgaacaccaagacacacagccgatcaggaatagaccaaccaaaaacacgacgacaaacatcagaacaaacacaaccacacccacacgacacacaacacacagccgcgcgagcgcacagacgagagagcgacaggagaccggcagcgagcgggcgaccgagagcaggaggagagacgagcaaggaagaccgccgacggagcaaggacggaggcgacgagcggcgcacgccgcgcgagcagacatgaaagggagtcgggccagcacaggcgtgagaagagcacacgaaccgaaagggcagtgtagaccagacagacgagagggaggggaggacggccgacgagaacgagacagaggggaggagagagacgagagcgcgagcggagagagagagaggagagagtgagcgagaggatgagagacgacgacggaggacgcagcgcggacagggagagcgcgggcgcgaggcacagacacgaagggacgcgggacgacaggagacgccgccaacgaagcggacgagagcgagagagagctaggagacggaacgaggccgacagagggccgaagcagcgggacggaacagcggcggcggcgagagagaggaggcgacacgccgggccggcgcgaagcaggagggcaaggcgacggccggagaccgcgcaaggggcgacgcaacgaggacgagacgagcgcctaacgagcaagcgacgtcggcacgacagcgtaacaggacacagcgaacaaatggaaaagcatcagtgaaaataagacaaagcactcacagcgagcaactaacaacacacagaagaaacagaccgaaacgaatcaagagaacacagaaccggacaaagcctcgccaaggacaggtgagagaaccagcacacaaccaacacaaacagctcgacaacaagcagacgaacaacaacaaatatcaacgaggcgcagcagctcaaaaaacaagaacaacacgacacgaaca

SEQ ID NO: 13930 - DNA, 1606 bp, Homo sapiens
cactcctgcctgggcaacgaagagtgaaactccatctcaaaacaaacaaacaaacaaacaaacaagcaaaagcactctaggtataaaaggaacttcctctgcctgcaagaccccccatctccttcccatgaagtccttaacttctgttcaacccaaacgcccagcgcgtcccttccactgcgctgcccgatgcacctcttcccgccacgccttcagtgttgtggtcatttgtgcctgcgcacccagggctgcaggtaccttcctcctgtgtgcttccaggacgggttattcaggatgctgagacgagccgccagcttcacacagaactggggtgagacctcagcacctgctgcctgtgttcctgaggctgtctgccaaggcgctcaggaaacgcacatgcctcctgagcctcatatgcacacctcgtggacggcagcctgcaggaccactggcaagttttgttgccgaaatccctcttcgaggaaaaaagtcaattgttggcaattagatattaagatcacataactcacttcaatcagtcgtctaaaaacaaacggctgataccactgagtctcaaggcagccagccagcgcaggggcttctgctgagggggcaggcggagcttgaggaaaccgcagataagtttttttctctttgaaagatagagattaatacaactacttaaaaaatatagtcaataggttactaagatattgcttagcgttaagtttttaacgtaattttaatagcttaagattttaagagaaaatatgaagacttagaagagtagcatgaggaaggaaaagataaaaggtttctaaaacatgacggaggttgagatgaagcttcttcatggagtaaaaaatgtatttaaaagaaaattgagagaaaggactacagagccccgaattaataccaatagaagggcaatgcttttagattaaaatgaaggtgacttaaacagcttaaagtttagtttaaaagttgtaggtgattaaaataatttgaaggcgatcttttaaaaagagattaaaccgaaggtgattaaaagaccttgaaatccatgacgcagggagaattgcgtcatttaaagcctagttaacgcatttactaaacgcagacgaaaatggaaagattaattgggagtggtaggactgaaacaattttggagatagatagaagtttgaagtgggaaaactggaacgaccagaagtacggggaaggccgacagacacagaatagagaagatagggaaattagaagataaaaacatacttttagaagaaaaaagataaatttaaacctgaaaagtaggaagcagaagaaaaaagacaagctaggaaacaaaaagctaagggcaaaatgtacaaacttagaagaaaattggaagatagaaacaagatagaaaatgaaaatattgtcaagagtttcagatagaaaatgaaaaacaagctaagacaagtattggagaagtatagaagatagaagtttgaagtggaaaactggaagacagaagtacgggaaggcgaagaaaagaatagagaagatagagaaattagaagataaaaacatacttttagaagaaaaaaagataaatttaaaaaaa

SEQ ID NO: 13931 - DNA, 1459 bp, Homo sapiens
  misc_feature 1, 2, 3, 4, 5, 6, 7, 8, 9, 1456, 1457, 1458, 1459: n = A,T,C or G
nnnnnnnnnatgaagtctttatattatatactctgtatcaagtcaaaatatctttggccattttgctaagaaacaaactttgaatgtcaaactgatgtcacagtagtttttgttagctttaaatcatttttgctttagtctttttacaggaagatcacgaagctatgcctgtcatgttgccacataattatacaatcaaacagatgccagatgaattgcctcattgctgcaaagtatcacccagatcggaaatcatatgatgatgtacggactgattcataaatttggccttggcactgctgccttttcacataaactgtattgatatcacttataagatgatagaccctgaaatgttaggattttgaaatgttagacttggaaggggcctggtctgtcaactagtccaaccccttaaaattcatagaggagcaaactggggcccattgaagggtgaagagttactcaaggtcaaacagctggtaacagaatcaagactaagacctaatttacctttccatactctttttttttctcaacttcatctatataaaatcaggcttttaaacataaccactaatatttacctgaagataaccatgagtaaagtatacttttgcattaattttttgagcttatatgcaaacataataaatattattaaatatcaggaaagctaacatttcatacaagatagcttcagaccaaattcaaattgaatttgaataaattagaaatactgtgcatacataaccttcttgtgcaccatgagtatttggaaagttaatccttgtttttgtcgtgtctataaaggaagaacaaaacaaaataaaaacagagccctagagaaatgctgttactttttatttttacacccatcagatttaaggaaaagactttttagccattataatctagtggttggaaggaatgaagaagcttttttagtaataggtccagatatgagtgctaaaaataaagatgatagcatgttcttctgtcttccatagttattacaactatgagagcctcccaagtcatcttatcaactcaactcccttttttttgtcttaatgttgcacataagtttatacagagtggatgaccacactagcacagaagagaacaacatgtattaaagcaggtgattcctccccttggcgggagagctctctcagtgtgaacatgccttctgtgggcggaaatcaggaagccaccagctgttaatggagagtgccttgcttttatttcagacagcagagttttccaaagtttctctgctcctctaacagcattgctctttagtgtgtgttaacctgtggtttgaaagaaatgctcttgtacattaacaatgtaaatttaaatgattaaattacattttatcaatggcaaaaaaaaaaaaaaaaaaaaaaaaaaaaattgtcttttaattggaactcttcccggtgtgaactcnnnn

SEQ ID NO: 13932 - DNA, 3058 bp, Homo sapiens
  misc_feature 1, 2, 3, 4, 21, 3058: n = A,T,C or G
nnnngtgcaaagaactgaagntcacagctgctagtgcctgggagatcaaatagtataaatgagggcagacaaccctgaggggcagatggagctttccagacaatcttggcatgaggatgagtgagtttcaaatcagtcctgccgaggcagatggcttcctccagctctgcttactgaatgcgaagtcacagtcagtaagaaaactggttttcttcttcccaggcgctgccccatacctgaagaccaagtttatctgtgtgacaccaacgacctgcagcaataccattgacctgccgatgtccccccgcactttagattcattgatgcagtttggaaataatggtgaaggtgctgaaccctcagcaggagggcagtttgagtccctcacctttgacatggagttgacctcggagtgcgctacctcccccatgtgaggagctgagaacggaactgcgaaagtacgctgaggcgcctacctgcattctgccacccctcacacagccaaaccccagatcatctgaaactactaactttgtggttccagattttttttaatctcctacttctgctatctttgagcaatctgggcacttttaaaaatagagaaatgagtgaatgtgggtgatctgcttttatctaaatgcaaataaggatgtgttctctgagacccatgatcaggggatgtggcggggggtggctagagggagaaaaaggaaatgtcttgtgttgttttgttcccctgccctcctttctcagcagctttttgttattgttgttgttgttcttagacaagtgcctcctggtgcctgcggcatccttctgcctgtttctgtaagcaaatgccacaggccacctatagctacatactcctggcattgcactttttaaccttgctgacatccaaatagaagataggactatctaagccctaggtttctttttaaattaagaaataataacaattaaagggcaaaaaacactgtatcagcatagcctttctgtatttaagaaacttaagcagccgggcatggtggctcacgcctgtaatcccagcactttgggaggccgaggcggatcataaggtcaggagatcaagaccatcctggctaacacggtgaaaccccgtctctactaaaagtacaaaaaattagctgggtgtggtggtgggcgcctgtagtcccagctactcgggaggctgaggcaggagaatcgcttgaacctgagaggcggaggttgcagtgagccaaaattgcaccactgcacactgcactccatcctgggcgacagtctgagactctgtctcaaaaaaaaaaaaaaaaaagaaacttcagttaacagcctccttggtgctttaagcattcagcttccttcaggctggtaatttatataatccctgaaacgggcttcaggtcaaacccttaagacatctgaagctgcaacctggcctttggtgttgaaataggaaggtttaaggagaatctaagcattttagacttttttttataaatagacttattttcctttgtaatgtattggccttttagtgagtaaggctgggcagagggtgcttacaaccttgactccctttctccctggacttgatctgctgtttcagaggctaggttgtttctgtgggtgccttatcagggctgggatacttctgattctggcttccttcctgccccaccctcccgaccccagtccccctgatcctgctagaggcatgtctccttgcgtgtctaaaggtccctcatcctgtttgttttaggaatcctggtctcaggacctcatggaagaagagggggagagagttacaggttggacatgatgcacactatggggccccagcgacgtgtctggttgagctcagggaatatggttcttagccagtttcttggtgatatccagtggcacttgtaatggcgtcttcattcagttcatgcagggcaaaggcttactgataaacttgagtctgccctcgtatgagggtgtatacctggcctccctctgaggctggtgactcctccctgctggggccccacaggtgaggcagaacagttagagggcctccccgcctgcccgccttggctggctagcttgcctctcctgtgcgtttgggaacacctagccgtgctggatgggttgctttgaatcaaaaggattgcgcgttgggatccaaacacacttgcccaggaacaaagacggagacgaccttctctaagatgaacagggttcgccccagtcctcctgcctggagacagttgatgtgtcatgcagagctcttacttctccagcaacactcttcagtacataataagcttaactgataaacagaatatttagaaaggtgagacttgggcttaccattgggtttaaatcatagggacctagggcgagggttcagggcttctctggagcagatattgtcaagttcatggccttaggtagcatgtatctggtcttaactctgattgtagcaaaagttctgagaggagctgagccctgttgtggcccattaaagaacagggtcctcaggccctgcccgcttcctgtccactgccccctccccatccccagcccagccgagggaatcccgtgggttgcttacctacctataaggtggtttataagctgctgtcctggccactgcattcaaattccaatgtgtacttcatagtgtaaaaatttatattattgtgaggttttttgtcttttttttttttttttttttggtatattgctgtatctactttaacttccagaaataaacgttatataggaaccgtcagaaaagaaaaaaaggccgcatcgatgaatcagcaattagtactagaccacaccatagtaaagagcgtcttctaacacatacaagaggccggcgccatcaaggaatttcctccagaggcgccactatttcactaccacacgttgtggtgacacgggcccccagggagcgtatatataaaagacaccgcaggctgttaaacagggacgagcgaaagcctcggtgtcttggaagagcccctggggggagattgggcccccagattagcgggan

SEQ ID NO: 13933 - DNA, 800 bp, Homo sapiens
acgcggggacccgagatctaatctctgtgctctgtgtattggcgacgagcagggtgagaataagtgcgtgcccaacagcaatgagagatactacggctacactggggctttccggtgcctggctgagaatgctggagacgttacatttgtgaaagatgtcactgtcttgcagaacactgatggaaataacaatgacgcatgggctaaggatttgaagctggcagactttgcgctgctgtgcctcgatggcaaacggaagcctgtgactgaggctagaagctgccatcttgccatggccccgaatcatgccgtggtgtctcggatggataaggtggaacgcctgaaacaggtgttgctccaccaacaggctaaatttgggagaaatggatctgactgcccggacaagttttgcttattccagtctgaaaccaaaaaccttctgttcaatgacaacactgagtgtctggccagactccatggcaaaacaacatatgaaaaatatttgggaccacagtatgtcgcaggcattactaatctgaaaaagtgctcaacctcccccctcctggaagcctgtgaattcctcaggaagtaaaaccgaagaagatggcccagctccccaaaaaagcctcagccattcactgcccccagctcttctccccaggtgtgttggggccttggcctcccctgctgaaggtggggattgcccatccatctgcttacaattccctgctgtggttttagcaaaaagtaaaatgagaaattttgttgaaaaaaaaaaaaaaaaaaaaaaaaaaaaaagt

SEQ ID NO: 13934 - DNA, 635 bp, Homo sapiens
  misc_feature 1, 443, 635: n = A,T,C or G
nagaatccatgttgtttcttaatccttaaaagtccttcaaagcagtacagtaagtcgtcaaaacctagcatcacggataggttcttggtaacttttcactttgagttttggccaggtgctgtggctcacacctgtaatcccaacgctttgggaggcctaggtaggaggaccactggaggccaggcatcagagaccagcccgggcagcatgacaagaccctgtctcccaaaaaaaaagaaaaggaaggaaagaaaagaaaaataaagtcacagtttccaagaacctaatgatgatgttaagtaaggacttattgtacctccgccgctgatacaaggaataaccaggagacagggatgggggtgcagggcatctttagaattctgcctaccacacgtcttcggatgtttagtttatgttgtcactccttctccgttactctcaanagtgttattctcaaaattatgttctttcatctaccttccttgctagaatttagctactcataaaatgtgtaaggaagagtgaccatggtttttcatttgtatcttctactaaagtagttccactaagcaaatgggtttggaaacaattcacaaacctattaacatattaataaaatatgtggagatttgccn

SEQ ID NO: 13935 - DNA, 458 bp, Homo sapiens
  misc_feature 1, 2, 3, 4, 5, 6: n = A,T,C or G
nnnnnnggaacacatccaagcttaagacggtgaggtcagcttcacattctcaggaacacatccaagcttaagacggtgaggtcagcttcacattctcaggaactctccttctttgggccacggaattaacccgagcaggcatggaggcctctgctctcacctgcagtcactgggagcaactggactctccggattgaccaagttcatcctgggctccattgggtctgccattgcggctgtcattgcgaggttctactagctccctgcccctcgccctgcagagaagagaaccatgccaggggagaaggcacccagccatcctgacccagcgaggagccaactatcccaaatatacctggggtgaaatataccaaattctgcatctccagaggaaaataagaaataaagatgaattgttgcaactcctaaaaaaaaaaaaaaaaaaaaaaaaaaaaagt

SEQ ID NO: 13936 - DNA, 903 bp, Homo sapiens
  misc_feature 1, 375, 397, 418, 423, 430, 431, 432, 449, 453, 454, 455,456, 460, 461, 465, 466, 469, 472, 473, 474, 475, 476, 477,480, 481, 483, 486, 490, 492, 501, 503, 507, 511, 538, 546,550, 554, 556, 564, 570, 573, 576, 577, 580, 584, 591: n = A,T,C or G
  misc_feature 595, 596, 615, 617, 620, 621, 623, 626, 632, 639, 642, 644,649, 650, 651, 652, 657, 661, 671, 688, 723, 729, 745, 877,902, 903: n = A,T,C or G
nagaaatcgcacttctcacatttaggcctcatttagacaatgaggaggtttagcctgtcccaccacctcccattgcaagggtttggctttttattgacacaaacacacaaaggcagctgtggtaatggggtggtggggtacacaaaagcagaaatcgcacttcacacatttaggcctcatttagacaatgaggaggctgagcctgtccctccacctcccattgcaatggttggggcaataaccctccctaatcctagctcagtgagtagagggagtgacctccctacccaggaagtccccattttggttgcaatggcccaggtcctgaccatcccactctgtacttccctgctccatctccccacccatgtaaanagagttttgggctgagtttganaagctgcctctctgctttganaaggnagtaggnnntcccctaactgcaaggngaannnncttnnattnnaanttnnnnnnaannanaanaaananaaagaactnantttnaganctctggctagtaaatgccacacatatntgcaaggntgangaanantccccgcntttatnctnaannacnatanaaaaggnaaanngaaaaaaaaaagatgaggnanctnntnttngttttnttttctnatntngtttnnnnttgantcanccaatggtanatacacagatttttggnagttttgtgggaatggggaggagaaaaaccccagntccaanagaaaaaggaaggaantggggagtacaggggaggagaaggaggtgggaaacaggatcctccctccccgccgccacacacacacaagcacaggttttcgttgctaaggcactgagaacaaatccagagaactcagtgaagggtgggggntctgtatccttccagagttgtgacnn

SEQ ID NO: 13937 - DNA, 1620 bp, Homo sapiens
ccacgcgtccgcagaagtccggtccatccagccttccgctccccattggcctgtgtggaggaagaggggtgggtaagccgaagtcgctgcgctcagtgcgcaggcgcgaagaagctggcaggggcacgagccgggggcgggtttgaagacgcgtcgttgggttttggaggccgtgaaacagccgtttgagtttggctgcgggtggagaacgtttgtcaggggcccggccaagaaggaggcccgcctgttacgatggtgtccatgagtttcaagcggaaccgcagtgaccggttctacagcacccggtgctgcggctgttgccatgtccgcaccgggacgatcatcctggggacctggtacatggtagtaaacctattgatggcaattttgctgactgtggaagtgactcatccaaactccatgccagctgtcaacattcagtatgaagtcatcggtaattactattcgtctgagagaatggctgataatgcctgtgttctttttgccgtctctgttcttatgtttataatcagttcaatgctggtttatggagcaatttcttatcaagtgggttggctgattccattcttctgttaccgactttttgacttcgtcctcagttgcctggttgctattagttctctcacctatttgccaagaatcaaagaatatctggatcaactacctgattttccctacaaagatgacctcctggccttggactccagctgcctcctgttcattgttcttgtgttctttgccttattcatcatttttaaggcttatctaattaactgtgtttggaactgctataaatacatcaacaaccgaaacgtgccggagattgctgtgtaccctgcctttgaagcacctcctcagtacgttttgccaacctatgaaatggccgtgaaaatgcctgaaaaagaaccaccacctccttacttacctgcctgaagaaattctgcctttgacaataaatcctataccagctttttgtttgtttatgttacagaatgctgcaattcagggctcttcaaacttgtttgatataaaatatgttgtcttttgtttaagcatttattttcaaacactaaggagctttttgacatctgttaaacgtctttttgtttttttgttaagtcttttacatttttaatagtttttgaagacaatctaggttaagcaagagcaaagtgccattgtttgcctttaattggggggtgggaagggaaagagggtacttgccacatagtttcctttttaactgcactttctttatataatcgtttgcattttgttacttgctaccctgagtactttcaggaagactgacttaaatattcggggtgagtaagtagttgggtataagatctgaacttttcatctgcagaggcaagaaaaatatttgacattgtgacttgactgtggaagatgatggttgcatgtttctagtttgtatatgtttccatctttgtgataagatgatttaataaatctctttaaatacttaaaaaaaaaaaaaaaaaaaaaaaaaaaaaaaaaaaaaaaaaaaaaaaaaaaaaaaaaaaaaaaaaaaaaaaaaaaaattaaaaaaaaaaaaagggggccccccccgggggg

SEQ ID NO: 13938 - DNA, 2352 bp, Homo sapiens
  misc_feature 1, 2, 3, 4, 5, 6, 7, 8, 2351, 2352: n = A,T,C or G
nnnnnnnnaagcggccgcgcggcagctgcggggcgtgggggtggtggtggcggcggcggtggtggcggcggcggcggcggcggcagctgaggccgaggaggcggtggctgtggcggacgcagcagcaccccagctagggatagggctccgccgcgcccccttgctggccccatggaggcggcagcggcggcggcggcggcggcagcggcagcggcagcggcgggcgggggctgtggctccgggccgccgccgctgctgctgagcgagggcgagcagcagtgctactccgagctcttcgcgcgctgtgccggcgccgcgggcgggggccccgggtctgggccccccgaggccgccagagtcgcccccggcacggccactgcggccgccggccccgtggctgacctgtttcgggcatcgcagctgcccgccgagacgctgcaccagatcacagaactgtgtggtgcaaagcgggttggttattttggtccaacacagttttacattgccctgaaattaattgctgcagcacaatctggcctcccggtacggatagagagtattaaatgtgaattgcctctgcctcgctttatgatgtcaaagaatgatggtgagatacgatttgggaacccagctgagctgcatggaactaaggttcagattccatatttaactacagaaaaaaattccttcaaaagaatggacgatgaggataaacagcaggaaacacagtctcccacgatgtcacccctcgcctcccctccttcttccccgcctcattaccagagggtgcccttgagccatggctacagcaaactgcggagcagcgcagaacagatgcatccagcaccttatgaagctaggcagccccttgtccagcccgagggatcctcatcagggggcccaggaaccaagccccttcggcatcaggcttcccttatccggtccttttcagtggagagggaactacaggataacagcagttaccccgacgaaccctggaggataacagaagaacagcgcgagtactatgtcaatcagttccgatcccttcagccagacccaagctctttcatttcaggttctgtggccaagaacttcttcaccaaatcaaagctttccattccagaactctcctatatatgggagcttagtgatgctgactgtgatggagccctgaccctgcctgagttctgtgctgcgtttcatctcattgtggctcggaagaacggctacccattgcctgagggcctccctccaactctgcagccagaatacctgcaggcagcttttcctaagcccaaatgggactgtcaattatttgattcttattctgagtcactgccggcaaatcaacaacctcgtgacttgaatcggatggagaagacatctgttaaagacatggctgaccttcctgtccctaaccaggatgtaactagtgatgacaaacaagctttgaaaagtactatcaatgaagccttaccaaaggacgtgtctgaggatccagcaactcccaaggattccaacagtctcaaagcaagaccaagatccagatcttactctagcacctccatagaagaggccatgaaaaggggcgaggaccctcccaccccgccacctcggccacagaaaacccattccagagcctcctccttggatctgaataaagtcttccagcccagtgtgccagctaccaagtcaggattgttacccccaccacctgcgctccctccaagaccttgtccatcacagtctgaacaagtgtcggaggccgagttactcccacagctgagcagagccccatcccaggctgcagaaagtagtccagcaaagaaggatgtactgtattctcagccaccatcaaagcccattcgtaggaaattcagaccagaaaaccaagctacagaaaaccaagagccttccactgctgcaagtgggccagcttctgcggcaaccatgaaaccgcatccaacagtccaaaagcagtcttccaaacagaagaaggccattcaaactgctatccgcaaaaataaagaggcaaacgcagtgctggctcggctgaacagtgagctccagcagcagctcaaggaggttcatcaagaacgaattgcattggaaaaccaattggaacaacttcgtccggtcactgtgttgtgacccccccatggttcaagtgacagtgggtgaccttgtctgccaagatctttcttttgaatgttttgaacccaactacttgtcatagatgtttgactgtgtcaaaagctgtgagcagcaaaatataatccatatgaccttttaaaaaaaaaaaaaaaaaactcgagggggggcgccggtacccaattcgccactatagnn

SEQ ID NO: 13939 - DNA, 4692 bp, Homo sapiens
  misc_feature 1, 4692: n = A,T,C or G
nagtcgaccacgcgtccgcgttggaacggaacgtggaggtggccctggccggggaggaggggcggcggcgaatgctgggagagtccgacgagcgctgcactaacgcaggatccggctgccgaaggtcctcgccagcaggatgaagttaaaggaagtagatcgtacagccatgcaggcatggagccctgcccagaatcaccccatttacctagcaacaggaacatctgctcagcaattggatgcaacatttagtacgaatgcttcccttgagatatttgaattagacctctctgatccatccttggatatgaaatcttgtgccacattctcctcttctcacaggtaccacaagttgatttgggggccttataaaatggattccaaaggagatgtctctggagttctgattgcaggtggtgaaaatggaaatattattctctatgatccttctaaaattatagctggagacaaggaagttgtgattgcccagaatgacaagcatactggcccagtgagagccttggatgtgaacattttccagactaatctggtagcttctggtgctaatgaatctgaaatctacatatgggatctaaataattttgcaaccccaatgacaccaggagccaaaacacagccgccagaagatatcagctgcattgcatggaacagacaagttcagcatattttagcatcagccagtcccagtggccgggccactgtatgggatcttagaaaaaatgagccaatcatcaaagtcagtgaccatagtaacagaatgcattgttctgggttggcatggcatcctgatgttgctactcagatggtccttgcctccgaggatgaccggttaccagtgatccagatgtgggatcttcgatttgcttcctctccacttcgtgtcctggaaaaccatgccagggggattttggcaattgcttggagcatggcagatcctgaattgttactgagctgtggaaaagatgctaagattctctgctccaatccaaacacaggagaggtgttatatgaacttcccaccaacacacagtggtgcttcgatattcagtggtgtccccgaaatcctgctgtcttatcagctgcttcgtttgatgggcgtatcagtgtttattctatcatgggaggaagcacagatggtttaagacagaaacaagttgacaagctttcatcatcttttgggaatcttgatccctttggcacaggacagccccttcctccgttacaaattccacagcagactgctcagcatagtatagtgctgcctctgaagaagccgcccaagtggattcgaaggcctgttggtgcttctttttcatttggaggcaaactggttacgtttgagaatgtcagaatgccttctcatcagggagctgagcagcagcagcagcagcaccatgtgttcattagtcaggttgtaacagaaaaggagttcctcagccgatcagaccaacttcagcaggctgtgcagtcacaaggatttatcaattattgccaaaaaaaaattgatgcttctcagactgaatttgagaaaaatgtgtggtcctttttgaaggtaaactttgaggatgattctcgtggaaaataccttgaacttctaggatacagaaaagaagatctaggaaagaagattgctttggccttgaacaaagtggatggagccaatgtggctcttaaagactctgaccaagtagcacagagtgatggggaggagagccctgctgctgaagagcagctcttgggagagcacattaaagaggaaaaagaagaatctgaatttctaccctcatctggaggaacatttaatatctctgtcagtggggacattgatggtttaattactcaggctttgctgacgggcaattttgagagtgctgttgacctttgtttacatgataaccgcatggccgatgccattatattggccatagcaggtggacaagaactcttggctcgaacccagaaaaaatacttcgcaaaatcccaaagcaaaattaccaggctcatcactgcagtggtgatgaagaactggaaagagattgttgagtcttgtgatcttaaaaattggagagaggctttagctgcagtattgacttatgcaaagccggatgaattttcagccctttgtgatcttttgggaaccaggcttgaaaatgaaggagatagcctcctgcagactcaagcatgtctctgctatatttgtgcagggaatgtagagaaattagttgcatgttggactaaagctcaagatggaagccaccctttgtcacttcaggatctgattgagaaagttgtcatcctgcgaaaagctgtgcaactcactcaagccatggacactagtactgtaggagttctcttggctgcgaagatgagtcagtatgccaatttgttggcagctcagggcagtattgctgcagccttggcttttcttcctgacaacaccaaccagccaaatatcatgcagcttcgtgacagactttgtagagcacaaggagagcctgtagcaggacatgaatcacctaaaattccgtacgagaaacagcagctccccaagggcaggcctggaccagttgctggccaccaccagatgccaagagttcaaactcaacaatattatccccatggagaaaatcctccacctccgggtttcataatgcatggaaatgttaatccaaatgctgctggtcagcttcccacatctccaggtcatatgcacacccaggtaccaccttatccacagccacagccttatcaaccagcccagccgtatcccttcggaacaggggggtcagcaatgtatcgacctcagcagcctgttgctcctcctacttcaaacgcttaccctaacaccccttacatatcttctgcttcttcctatactgggcagtctcagctgtacgcagcacagcaccaggcctcttcacctacctccagccctgctacttctttccctcctcccccttcctctggagcatccttccagcatggcggaccaggagctccaccatcatcttcagcttatgcactgcctcctggaacaacaggtacactgcctgctgccagtgagctgcctgcgtcccaaagaacaggtcctcagaatggttggaatgaccctccagctttgaacagagtacccaaaaagaagaagatgcctgaaaacttcatgcctcctgttcccatcacatcaccaatcatgaacccgttgggtgacccccagtcacaaatgctgcagcaacagccttcagctccagtaccactgtcaagccagtcttcattcccacagccacatcttccaggtggccagcccttccatggcgtacagcaacctcttggtcaaacaggcatgccaccatctttttcaaagcccaatattgaaggtgccccaggggctcctattggaaataccttccagcatgtgcagtctttgccaacaaaaaaaattaccaagaaacctattccagatgagcacctcattctaaagaccacatttgaggatcttattcagcgctgcctttcttcagcaacagaccctcaaaccaagaggaagctagatgatgccagcaaacgtttggagtttctgtatgataaacttagggaacagacactttcaccaacaatcaccagtggtttacacaacattgcaaggagcattgaaactcgaaactactcagaaggattgaccatgcatacccacatagttagcaccagcaacttcagtgagacctctgctttcatgccagttctcaaagttgttctcacccaggccaataagctgggtgtctaaaaggacagcttctcttccactcaatattgccatttttccaaagaaacatgttaaaaaaaaaaattataagacatggactagtcctcattagcatgtttgcatagcaaccagtcaagagcatttacactatttctgctgatatactcaccttagaactgctcagaaccctggtgctttatttttgttttaatcttttgttgccagtgatgattttcctattctgcaaatagtgtatttcctggattacacatagtatggtttcctgaagtattctgataaatgtgttttttaaaacctcaatatactttttagaaaaggagcatctggttatgcataaagcagagctaaaactaaatttctttcatgtcctccctacttcctcagtgtcaatcagattaaagtgtgtaatcctaaaaacaaaaagaacaaaaaaaaaaaaagattttgggggggccggggaaccccgggggccttttgcgcccccttgtgtggggggcggggccccatgttgtatggaccctggggccaaggggtcccaaggaaacccggtcaggaataggctgggtgttccccccaaaaaaccgcggcggacccgagcgcttttgcgaaccaatgggagtgccggttggggtcccttagggccctcttacaggacccttcgaggccagattcgttcacaacccccgcggtgggtgaaacgcacaagacagagacagtagcacaaccaaagacgaacacgaagcaaaacaagacaaaacccaacacacattacaacgaacaacaacaaacacaacagaacaaagacacaactcactgaagaacgaagagctcgcagatgacgccaaccaacaatagagaagaaagataaaaactctaaactacaagagaan

SEQ ID NO: 13940 - DNA, 817 bp, Homo sapiens
actaaggtgagatcatttaattttgactaaagatacttttgttttgttttgtttgagatggagttttgttcttgttgcccaggctggagtgagactccatctcaaaaaaaaaaaaaagtaccaaaatgttacctgatagtaaaatacaaaattttttgtttactcatttatttcccaagttttgtatgaatatgcactatttttatgatcatgcctgcatactccttactctttatcctgccctttctgtaaggagtccaaggtggaaatgctcatgtgatgtgaactaattaaatttttcttaaaaacaattttaaaaaccatgacttaaaaagcacggtctgctttagttataatggcagattctgaactatacacacatgtattatatatacataaaatgctagaagacagactatggtcctttcatctgcatttgagtacagtggccccccgtgaaagacagaattgtggttttcctggtgtcacgccctcccagtgtgcaaataagggctgctgtttcgacgacaccgttcgtggggtcccctggtgcttctatcctaataccatcgacgtccctccagaagaggagtgtgaattttagacacttctgcagggatctgtctgcatcctgacgcggtgccgtccccagcacggtgattagtcccagagctcggctgccacctccaccggacacctcagacacgcttctgcagctgtgcctcggctcacaacacagattgactgctctgactttgactactcaaaattggcctaaaaattaaaagagatcgatatcaaaaaaaaaaaaaaaaaa

SEQ ID NO: 13941 - DNA, 519 bp, Homo sapiens
  misc_feature 509, 510, 511, 512, 513, 514, 515, 516, 517, 518, 519: n = A,T,C or G
acgcggggactctcgtaggactgctctacactgggcctgtgtcaatggccatgaggaagtagtaacatttctggtagacagaaagtgccagcttgacgtccttgatggcgaacacaggacaccttgatgaaggctctacaatgccatcaggaggcttgtgcaaatattctgatagattctggtgccgatataaatctcgtagatgtgtatggcaacacggctctccattatgctgtttatagtgagattttgtcagtggtggcaaaactgctgtcccatggtgcagtcatcgaagtgcacaacaagaaggaacatctgcaggaacacctgatgagactgcacccttggcggaaagaacacctgacacagctgaaagcttggtggaaaaaacacctgatgaggctgcacccttggtggaaagaacacctgacacggctgaaagcttggtggaaaaaacacctgatgaggctgcatccttggtggagggaacatctgacaaaattcaatgnnnnnnnnnnn

SEQ ID NO: 13942 - DNA, 1610 bp, Homo sapiens
acgctgcccaggcaaagcgtccgggcagcgtaggcgggcgactcagatcccagccagtggacttagcccctgtttgctcctccgataactggggtgaccttggttaatattcaccagcagcctcccccgttgcccctctggatccactgcttaaatacggacgaggacagggccctgtctcctcagcttcaggcaccaccactgacctgggacagtgaatcgacaatgccgtcttctgtctcgtggggcatcctcctgctggcaggcctgtgctgcctggtccctgtctccctggctgaggatccccagggagatgctgcccagaagacagatacatcccaccatgatcaggatcacccaaccttcaacaagatcacccccaacctggctgagttcgccttcagcctataccgccagctggcacaccagtccaacagcaccaatatcttcttctccccagtgagcatcgctacagcctttgcaatgctctccctggggaccaaggctgacactcacgatgaaatcctggagggcctgaatttcaacctcacggagattccggaggctcagatccatgaaggcttccaggaactcctccgtaccctcaaccagccagacagccagctccagctgaccaccggcaatggcctgttcctcagcgagggcctgaagctagtggataagtttttggaggatgttaaaaagttgtaccactcagaagccttcactgtcaacttcggggacaccgaagaggccaagaaacagatcaacgattacgtggagaagggtactcaagggaaaattgtggatttggtcaaggagcttgacagagacacagtttttgctctggtgaattacatcttctttaaaggcaaatgggagagaccctttgaagtcaaggacaccgaggaagaggacttccacgtggaccaggtgaccaccgtgaaggtgcctatgatgaagcgtttaggcatgtttaacatccagcactgtaagaagctgtccagctgggtgctgctgatgaaatacctgggcaatgccaccgccatcttcttcctgcctgatgaggggaaactacagcacctggaaaatgaactcacccacgatatcatcaccaagttcctggaaaatgaagacagaaggtctgccagcttacatttacccaaactgtccattactggaacctatgatctgaagagcgtcctgggtcaactgggcatcactaaggtcttcagcaatggggctgacctctccggggtcacagaggaggcacccctgaagctctccaaggccgtgcataaggctgtgctgaccatcgacgagaaagggactgaagctgctggggccatgtttttagaggccatacccatgtctatcccccccgaggtcaagttcaacaaaccctttgtcttcttaatgattgaacaaaataccaagtctcccctcttcatgggaaaagtggtgaatcccacccaaaaataactgcctctcgctcctcaacccctcccctccatccctggccccctccctggatgacattaaagaagggttgagctggtccctgcctgcatgtgactgtaaatccctcccatgttttctctgagtctccc

SEQ ID NO: 13943 - DNA, 503 bp, Homo sapiens
  misc_feature 1, 500, 501, 502, 503: n = A,T,C or G
naccttttttttttttttttttttttttttttttaaatgtctcatcgcagtttattagcctctacagttctaaatttactaaagagggcaaaaatacaggttttgaaagcactccttcccaggctcacaggcagcagacatgacttagaaggaaaaagggcatacagcggttcttcaagatttaatgagctgactctcctggctcccagcaggcaggctggctgtcaggtaagcctcttccatccaaggtggaaggatcacagtccctccagttagacaggaggaaaattaggacccaaaaagatgaagttatttgcccaaggttctacagctaaagtaggattaaaacccagagctctggccgagcgcggtggctcacacctgtaatctcggcactttgggaggccgaggcgccgcgccatcccctccgtccattcgtgaccacccctaccttcttccagccaccctcacacgtcctcacctagggaattcttcatccnnnn

SEQ ID NO: 13944 - DNA, 341 bp, Homo sapiens
ccgggcaggtaccagcagaaatcaggacagtcccctaagctactcacttactgggcatctacccgggaatccggggtccctgaccgattcagcggcagcgggtccgggacagaattcactctcaccatcaacaacctgcaggctgaagatgtggcagtttattactgtcagcaatattatactactcctctcactttcggcggagggaccaaggtggagatcaagcgaactgtggctgcaccatctgtcttcatcttcccgccatctgatgagcagttgaaatctggaactgcctctgttgtgtgcctgctgaataacttctatcccagagaggccaaagt

SEQ ID NO: 13945 - DNA, 5658 bp, Homo sapiens
ccgatagaggctgggggtggggggggaggtcaagcgtagcctcttctcctttaccaagatggcggcttgtccctgtttcgccacagttcctaccttatgagctcggttttcttatgcttataagagtggaacagcaaaagctggcaggctgacagaggcggcctcaggacggaccttctggctactgaccgttttgctgtggttttcccggattgtgtgtaggtgtgagatcaaccatgagttccgttgcagttttgacccaagagagttttgctgaacaccgaagtgggctggttccgcaacaaatcaaagttgccactctaaattcagaagaggagagcgaccctccaacctacaaggatgccttccctccacttcctgagaaagctgcttgcctggaaagtgcccaggaacccgctggagcctgggggaacaagatccgacccatcaaggcttctgtcatcactcaggtgttccatgtacccctggaggagagaaaatacaaggatatgaaccagtttggagaaggtgaacaagcaaaaatctgccttgagatcatgcagagaactggtgctcacttggagctgtctttggccaaagaccaaggcctctccatcatggtgtcaggaaagctggatgctgtcatgaaagctcggaaggacattgttgctagactgcagactcaggcctcagcaactgttgccattcccaaagaacaccatcgctttgttattggcaaaaatggagagaaactgcaagacttggagctaaaaactgcaaccaaaatccagatcccacgcccagatgaccccagcaatcagatcaagatcactggcaccaaagagggcatcgagaaagctcgccatgaagtcttactcatctctgccgagcaggacaaacgtgctgtggagaggctagaagtagaaaaggcattccaccccttcatcgctgggccgtataatagactggttggcgagatcatgcaggagacaggcacgcgcatcaacatccccccacccagcgtgaaccggacagagattgtcttcactggagagaaggaacagttggctcaggctgtggctcgcatcaagaagatttatgaggagaagaaaaagaagactacaaccattgcagtggaagtgaagaaatcccaacacaagtatgtcattgggcccaagggcaattcattgcaggagatccttgagagaactggagtttccgttgagatcccaccctcagacagcatctctgagactgtaatacttcgaggcgaacctgaaaagttaggtcaggcgttgactgaagtctatgccaaggccaatagcttcaccgtctcctctgtcgccgccccttcctggcttcaccgtttcatcattggcaagaaagggcagaacctggccaaaatcactcagcagatgccaaaggttcacatcgagttcacagagggcgaagacaagatcaccctggagggccctacagaggatgtcaatgtggcccaggaacagatagaaggcatggtcaaagatttgattaaccggatggactatgtggagatcaacatcgaccacaagttccacaggcacctcattgggaagagcggtgccaacataaacagaatcaaagaccagtacaaggtgtccgtgcgcatccctcctgacagtgagaagagcaatttgatccgcatcgagggggacccacagggcgtgcagcaggccaagcgagagctgctggagcttgcatctcgcatggaaaatgagcgtaccaaggatctaatcattgagcaaagatttcatcgcacaatcattgggcagaagggtgaacggatccgtgaaattcgtgacaaattcccagaggtcatcattaactttccagagcccagcacaaaaaagtgacattgtccagctcagaggacctaagaatgaggtggaaaaatgcacaaaatacatgcagaagatggtggcagatctggtggaaaatagctattcaatttctgttccgatcttcaaacagtttcacaagaatatcattgggaaaggaggcgcaaacattaaaaagattcgtgaagaaagcaacaccaaaatcgaccttccagcagagaatagcaattcagagaccattatcatcacaggcaagcgagccaactgcgaagctgcccggagcaggattctgtctattcagaaagacctggccaacatagccgaggtagaggtctccatccctgccaagctgcacaactccctcattggcaccaagggccgtctgatccgctccatcatggaggagtgcggcggggtccacattcactttcccgtggaaggttcaggaagcgacaccgttgttatcaggggcccttcctcggatgtggagaaggccaagaagcagctcctgcatctggcggaggagaagcaaaccaagagtttcactgttgacatccgcgccaagccagaataccacaaattcctcatcggcaaggggggcggcaaaattcgcaaggtgcgcgacagcactggagcacgtgtcatcttccctgcggctgaggacaaggaccaggacctgatcaccatcattggaaaggaggacgccgtccgagaggcacagaaggagctggaggccttgatccaaaacctggataatgtggtggaagactccatgctggtggaccccaagcaccaccgccacttcgtcatccgcagaggccaggtcttgcgggagattgctgaagagtatggcggggtgatggtcagcttcccacgctctggcacacagagcgacaaagtcaccctcaagggcgccaaggactgtgtggaggcagccaagaaacgcattcaggagatcattgaggacctggaagctcaggtgacattagaatgtgctataccccagaaattccatcgatctgtcatgggccccaaaggttccagaatccagcagattactcgggatttcagtgttcaaattaaattcccagacagagaggagaacgcagttcacagtacagagccagttgtccaggagaatggggacgaagctggggaggggagagaggctaaagattgtgaccccggctctccaaggaggtgtgacatcatcatcatctctggccggaaagaaaagtgtgaggctgccaaggaagctctggaggcattggttcctgtcaccattgaagtagaggtgccctttgaccttcaccgttacgttattgggcagaaaggaagtgggatccgcaagatgatggatgagtttgaggtgaacatacatgtcccggcacctgagctgcagtctgacatcatcgccatcacgggcctcgctgcaaatttggaccgggccaaggctggactgctggagcgtgtgaaggagctacaggccgagcaggaggaccgggctttaaggagttttaagctgagtgtcactgtagaccccaaataccatcccaagattatcgggagaaagggggcagtaattacccaaatccggttggagcatgacgtgaacatccagtttcctgataaggacgatgggaaccagccccaggaccaaattaccaaacccaaccacacaatggtttgtctcaatctgacccagcggctggaccctccgtaaattgttgacgctcttcccccttcccgaggtcccgcagggagcctagcgcctggctgtgtgtgcggccgctcctccaggcctggccgtgcccgctcaggacctgctccactgtttaacactaaaccaaggtcatgagcattcgtgctaagataacagactccagctcctggtccacccggcatgtcagtcagcactctggccttcatcacgagagctccgcagccgtggctaggattccacatcctgtgtcatgacctcaggaaataaacgtccttgactttataaaagccaaacgtttgccctcttcctttcccacctccctcctgccagtttcccttggtccagacagtcctgtttgtggagtgcaatcagcctcctccagctgccagagcgcctcagcacaggtgtcagggtgcaaggaagacctggcaatggacagcaggaggcaggttcctggagctggggggtgacctgagaggcagagggtgacgggttctcaggcagtcctgattttacctgccgtggggtctgaaagcaccaagggtccctgcccctacctccactgccagaccctcagcctgaggtctggtgagtggagcctggaggcaaggtggtaggcaccatctgggtcccctgtggccgtcacagtgtctgctgtgattgagatgcgcacaggttgggggaggtagggccttacgcttgtcctcagtgggggcagtttgccttagatgacagctgggctgcttcttcacaccacctgcagcccctccctgcccctgccctagcctgctgtgtgttcagttgccttctttctacctcagccggcgtggagtggtctctgtgcagttagtgccaccccacacacccgtctcttgattgagatgtttctggtggttatgggtttcccgtggagctgggggtgggcgccgtgtacctaagctggaggctggcgctctccctcagcacaggtgggtcagtggccagcaggcccatctggagtgggagtgggcacttccaccccgcccacaggccatccggctgtgcaggccagcccctaggagcaggtcccgggtgactggcagttttcacggtctagggccgagacgatggcatggggcctagagcatgaggtagagcagaatgcagaccacgccgctggatgccgagagaccctgctctccgagggaggcatctgtgtcatgctgtgagggctgaggacggggccctagtctctggttttctggtcttaacatccttatctgtgtccgccacggaggtgactgagctgctagcgagttgtcctgtcccagggtacttgagttttggaaaagctgactcacgcccatccatctcacagcccttccctgggggacagtcgcttccgccttgacacctcactctcagttgaataactcaagcttggtcatcttcagactcgaattcttgagtagacccagacggcttagcccaagtctagttgcagctgcctcggcaagtccccatttgctcaggcagccctgaatgggcctgtttacaggaatggtaaattgggattggaaggaatatagcttccagcttcataggctagggtgaccacggcttaggaaacagggaaagaaagcaaggcccttttcctgcctttcccgggatctgtctactccacctccacgggggaggccagtggggaagggctgtcacctcttccccatctgcatgagttctggaactctgtcctgttggctgcttgcttccagctccccccaatctccatcgcagcgggttcctcctgtcttttctacagtgtcatttgcacatctctgtatgtcgcttgatgtcttagacgcgagccctttcctaaactgttcagcgctctcttttcctttgggtggttgttgcaagggtgatgacatgactgtccccaggcctgtctccctgaagcgtctgtgctgtcaggacagccctgggcagagatgaggcaggggtgaagcgtgcgtgtgcttttcctccttgttggatgtctttcatatcatctgtttccatagctacaatccatccctc

SEQ ID NO: 13946 - DNA, 2362 bp, Homo sapiens
agggagtcgacccacgcgtccggaaccttcctgccgtcgcgtttgcacctcgctgctccagcctctggggcgcattccaaccttccagcctgcgacctgcggagaaaaaaaaattacttattttcttgccccatacataccttgaggcgagcaaaaaaattaaattttaaccatgagggaaatcgtgcacatccaggctggtcagtgtggcaaccagatcggtgccaagttctgggaggtgatcagtgatgaacatggcatcgaccccaccggcacctaccacggggacagcgacctgcagctggaccgcatctctgtgtactacaatgaagccacaggtggcaaatatgttcctcgtgccatcctggtggatctagaacctgggaccatggactctgttcgctcaggtccttttggccagatctttagaccagacaactttgtatttggtcagtctggggcaggtaacaactgggccaaaggccactacacagagggcgccgagctggttgattctgtcctggatgtggtacggaaggaggcagagagctgtgactgcctgcagggcttccagctgacaccgtggtcgagccctacaatgccaccctctccgtccatcagttggtagagaatactgatgagacctattgcattgacaacgaggccctctatgatatctgcttccgcactctgaagctgaccacaccaacctacggggatctgaaccaccttgtctcaatgctgaccttcgcaagttggcagtcaacatggtccccttcccacgtctccatttctttatgcctggctttgcccctctcaccagccgtggaagccagcagtatcgagctctcacagtgccggaactcacccagcaggtcttcgatgccaagaacatgatggctgcctgtgacccccgccacggccgatacctcaccgtggctgctgtcttccgtggtcggatgtccatgaaggaggtcgatgagcagatgcttaacgtgcagaacaagaacagcagctactttgtggaatggatccccaacaatgtcaagacagccgtctgtgacatcccacctcgtggcctcaagatggcagtcaccttcattggcaatagcacagccatccaggagctcttcaagcgcatctcggagcagttcactgccatgttccgccggaaggccttcctccactggtacacaggcgagggcatggacgagatggagttcaccgaggctgagagcaacatgaacgacctcgtctctgagtatcagcagtaccaggatgccaccgcagaagaggaggaggatttcggtgaggaggccgaagaggaggcctaaggcagagcccccatcacctcaggcttctcagttcccttagccgtcttactcaactgcccctttcctctccctcagaatttgtgtttgctgcctctatcttgttttttgttttttcttctgggggggggtctagaacagtgcctggcacatagtaggcgctcaataaatacttgtttgttgaatgtctcctctctctttccactctgggaaacctaggtttctgccattctgggtgaccctgtatttctttctggtgcccattccatttgtccagttaatacttcctcttaaaaatctccaagaagctgggtctccagatcccatttagaaccaaccaggtgctgaaaacacatgtagataatggctatcatcctaagcccaaagtagaaaatggtagaaggtagtgggtggaagtcactatataaggaaggggatgggattttccattctaaaagttttggagagggaaatccaggctattaaagtcactaaatttctaagtatgtccatttcccatctcagcttcaagggaggtgtcagcagtattatctccactttcaatctccctccaagctctactctttggaggagtctgtcccactctgtcaagtggaatccttccctttccaactctacctccctcactcgagctcctttcccctgatcagagaaagggatcaagggggttgggaggggggaaagagaccagccttggtccctaagcctccagaaacgtcttcttaatccccaccttttcttactcccaaaaaagaatgaacacccctgactctggaatggtgtatactgccacatcagtgtttgagtcagtccccagaagagaggggaaccctcctccatcttttttgcaacatctcatttcttccttttgctgttgcttcccccctcacacacttggttttgttctatcctacatttgagatttctattttgtgttgaacttgctgctttttttcatattgaaaagatgacatcgccccaagagccaaaaataaatgggaattgaaaaa

SEQ ID NO: 13947 - DNA, 1461 bp, Homo sapiens
  misc_feature 1295, 1296, 1427, 1428, 1429, 1430, 1431, 1432, 1433, 1434,1435, 1436, 1437, 1438, 1439, 1440, 1441, 1442, 1443, 1444,1445, 1446, 1447, 1448, 1449, 1450, 1451, 1452, 1453, 1454,1455, 1456, 1457, 1458, 1459, 1460, 1461: n = A,T,C or G
atgactgccactctccgcccctacctgagtgccgtgcgggccacattgcaggctgcctctgcctggagaacttctcctcccaggttgtggaacgacacaacaagccggaagtggaagtcaggagtagcaaagagctcctgttacaacctgtgaccatcagcaggaatgagaaggaaaaggttctgattgagggctccatcaactctgtccgggtcagcattgctgtgaaacaggctgatgagatcgagaagattttgtgccacaagttcatgcgcttcatgatgatgcgagcagagaacttctttatccttcgaaggaagcctgtggaggggtatgatatcagctttctgatcaccaacttccacacagagcagatgtacaaacacaagttggtggactttgtgatccacttcatggaggagattgacaaggagatcagtgagatgaagctgtcagtcaatgcccgtgcccgcattgtggctgaagagttccttaagaatttttaaaccatctggctggatctcgtggcttccccctcagactacccatgtctccacgaaggcgtctggagtcactccccgagcagcgcggcggcggcaggagttgggttggggtgggcatttgatgcgggaggtgggtggtgtgcttgctagctgggcaagaaagcagcaggggacctgccccaaggccacacgtgcctggtcggccggcttctgatgttcagtccctgggcgggacgatttttttacgtctgaacttaaccctgtgctgtgggtactgtaccttttgctttttttttttaaacccccccccgggtggagcggcccaggattacctatggggcggggctggggccggccgaggtttttctccatgaccgggggggggggcccctcccgcctttcaccgtgccatggggccctgttagccggggggcggtcatcttcgcctgttccgcgctgactcccctggcccgccccccagcactggttggggacaagggccaaattggtgaccaccagtcatgcctaggacctggggcccaaaagccgggcaacctctggctacaggggccattgggtgccctcccagttgagaggggccgctgtttcgccttgtccgtcagtgccagtgcctgtgccagaggtggcgaggtgagtcctccagagcttcctggccgggccctcctcctgcctgttctggctcctctgctcccacgctagctgtcccttttctgattctggtggatcctccctcccctaattaaagtctctttttgcccctttggggctgcnnaaaaaaaaaaaaaaaaaaaaaaaaaaaaaaaaaaaaaaaaaaaaaaaaaaaaaaaaaaaaaaaaaaaaaaaaaaaaaaaaaaaaaaaaaaaaaaaaaaagggggggccgttaaaatattttaaaaaaaaannnnnnnnnnnnnnnnnnnnnnnnnnnnnnnnnnn

SEQ ID NO: 13948 - DNA, 1010 bp, Homo sapiens
  misc_feature 1, 2, 3, 4, 5, 164, 165, 166, 167, 168, 169, 170, 171, 172,173, 174, 175, 176, 177, 178, 179, 180, 181, 183, 1010: n = A,T,C or G
nnnnnagttggaagaagcactctccccctccctgagccaaggattgaacagctaggggggaaaggtggcatccgtcattagttggggcatcagtacagcacagggcccggaacctaaggcgtatccatcctggcccccagggaaacatcagcgggagcgggccnnnnnnnnnnnnnnnnnncnttttttttttttttttgcaggttgaatgcacgggttttattgagtggtggaggtggttctctgaaggatgcatgcagagctggaagcggggatggcacgggaagataatcttcctgctgggtggccaaacctctccgaccaccctcggctgaactcctctcggcgtgcaaatgttcctcttctctctttctctgctggatcggttcaccattcatctgcttgtctgggatggtgaagacaactgtttgctcatttgcttggcgataggtggattgtctcgccgctcagctataggcgatggtctcaccacttcggggataggcgattgtcccatctaggtcgccaaaatgtgtctggaattggtgggttctatcgtctcactgacttctagaatgaagccggcggacactcgcagtgaagtgttgccaagttcttaaaggcggcatggctaagagtttgttcccttctgatgttcggatgtgttcacaggattcttccttctggtgggggttcgcgggatctccctgcctcaggagtgaagtctgtggacccctcccctggatgttccagcctccataaaggccagtgtggaccccaaagagctgtgcacgcagcagagactctattgcaaagagacccaaaagaaccaagacttcccgctggtgtggtaagggacctcaagcatggttgcctccccgcgtaccattctcggacggccgttatgaaaatattgtatccccgggcatcagagatttcgatctcggcttaatcttttcttgtacattggggggggggccatcacaacttacaggctccttagtgaggcn

SEQ ID NO: 13949 - DNA, 599 bp, Homo sapiens
  misc_feature 483, 485, 486, 488, 489, 490, 491, 492, 493, 494, 495, 496,497, 498, 499, 500, 501, 502, 503, 504, 505, 506, 507, 508,509, 510, 511, 512, 513, 592, 593, 594, 595, 596, 597, 598,599: n = A,T,C or G
acgcggggaccacttctctgggacacattgccttctgttttctccagcatgcgcttgctccagctcctgttcagggccagccctgccaccctgctcctggttctctgcctgcagttgggggccaacaaagctcaggacaacacgttaaaacttacctcattagcagcatccctctacaaggtgcatttaactataagtatactgcctgcctatgtgacgacaatccaaaaaccttctactgggacttttacaccaacagaactgtgcaaattgcagccgtcgttgatgttattcgggaattaggcatctgccctgatgatgctgctgtaatccccatcaaaaacaaccggttttatactattgaaatcctaaaggtagaataatggaagccctgtctgtttgccacacccaggtgatttcctctaaagaaacttggctggaatttctgctgtggtctataaaataaacttcttaacatgcgtncnnannnnnnnnnnnnnnnnnnnnnnnnnntccccggggccccttaaaaaatgggggcccccccgggcgggggaatttttttttaaatttttttatcccccccaccccnnnnnnnn

SEQ ID NO: 13950 - DNA, 568 bp, Homo sapiens
  misc_feature 567, 568: n = A,T,C or G
gtggcgttcaagatgtcgaccagaatttccgagtcagtgacggggactggatttgccctgacaaaaaatgtggaaatgtaaactttgctagaagaaccagctgtaatcgatgtggtcgggagaaaacaactgaggccaagatgatgaaagctgggggcactgaaataggaaagacacttgcagaaaagagccgaggcctatttagtgctaatgactggcaatgtaaaacttgcagcaatgtgaattgggccagaagatcagagtgtaatatgtgtaatactccaaagtatgctaaattagaagaaagaacaggatatggtggtggttttaatgaaagagaaaatgttgaatatatagaaagagaagaatctgatggtgaatatgatgagtttggacgtaaaaagaaaaaatacagagggaaagcagttggtcctgcatctatattaaaggaagttgaagataaagaatcagagggagaagaagaggatgaggatgaagatctttccaaatacaaattagatgaggatgaggatgaagatatgctgatctctaaaatataatcttgann

SEQ ID NO: 13951 - DNA, 1280 bp, Homo sapiens
  misc_feature 1, 2, 1279, 1280: n = A,T,C or G
nngaaagagacccctctgacctaaaaaaagtgaaagctgtggaagaaaatggagaagaagctgagccagtacgtaatggtgctgagagtgtttctgagggtgaaggaatagatgctaattcaggctccacagatagttctggtgatggggttacatttccatttaaaccagaatcctggaagcctactgatactgaaggtaagaagcagtatgacagggagtttctgctggacttccagttcatgcctgcctgtatacaaaaaccagagggcctgcctcctatcagtgatgtggttcttgacaagatcaaccaacccaaattgccaatgcgaactctggatcctcgaattttgcctcgaggaccagactttacaccagcctttgctgattttggaaggcagacacctggtggaagaggcgtacctgtaagtgcaagttccctacaactcacttagttagacactggcacagactccatgaaatcctacctcatggcaagacagcagcttttattcgttgattctagtcaagaagaagaagaagaggcaaagactatcctttccatactcatattaaagcagataaagaatacacttgagttctttttacttggcagaagctagtctgcattaatttggtcttgattttttttttccctattttttcaattgaggtgacctgcaaataggtttaaaaatagtgccaaccatggccagggatggtggctcaggtctgtaatgctagcactttgtggggtcaaggcaggaggatcacttgaggtcaggagttcaaggtcagcctgacaacaaagagagaccctgtctctgctaaaaatacacaaaaaattagtcaggcctgggagcaggcgcctgtagtcccaacaacttgggaggctgagacaggagaatagcttgaacctgggagacggaggttgcagtgagcttagattgtgccactgcactccagcctgggcaatagagtgaggctctgtctcaaaaaaagaaaaaaagaaagaaaattaaagataattctatgttaactccttaaatgtaattcctagttcttctatcacctttagccgactcttctaccttcagagtggacactgctgttatcaagcagagagtgccgatcttactcaagtacctagactcagatacagagaaggaactgcaagcactttatgcactacaagcatcgatagtaaaacttgatcaaccggccagtaagtttatctcatgttacagttaatctaaccaatgagtgagatttatccaann

SEQ ID NO: 13952 - DNA, 670 bp, Homo sapiens
  misc_feature 1, 8, 9, 10, 668, 669, 670: n = A,T,C or G
nctgaatnnngaggggagaagcccctgggtctttctttgaaaggaatccgctgcttgagggctgcctccctcatggtgtgcgtgtcgtttctcttcctgacgcatcttgtgatatcagaggtaactatgcaaagcatccaggcggttctgaatgtgaagcactacacccagcagagtcccggtgccctctgtccccactgccggcccatgttctctctccggaggtcaccaaggaatgcccaggtttcgactaccaagaaaggggaggccttgggttctttcaaaaaattcgtgaggagagctgtctacagtggaatagggggtctccctggggaatgcaggccaagtccttttattttaacatgatgtccatgaagaggtttgccgtttgggcagccctgtcggcaaggagggggcaaactgcgttggggaattgtttgctggatctcccttccctttgagctgtattgttctttaatggctgtcttgcccttccaaaaaaacccttgacaaaaaaaaaaaaaaagatcggcgaagttatccttagtaagctaagttttgtttagtttactgtgaaatgaactgtatggcttatttacagtatattttaatgattcttaataaacaccttatcgatgttgtcgacctaaaaagggaagggcggcacnnn

SEQ ID NO: 13953 - DNA, 1700 bp, Homo sapiens
  misc_feature 1, 2, 3, 4, 5, 6, 7, 8, 9, 10, 11, 12, 13, 14, 15, 16, 17,18, 19, 20, 21, 22, 23, 24, 25: n = A,T,C or G
nnnnnnnnnnnnnnnnnnnnnnnnngctaaatttttagtatcaggatgatacaggttttatagaatgagttaaggaggagtccctctttctcatttcagggcttatttgactggtaggtttttaattactgcttcaatttcattacttgcttctgttctattcaatatttctgttccttccttgttcaactttgttcagtcttccttgttcaattccttgtgtttccattaatttattcatttcctctagtttgtgtaaatagatatgcttatagtagcttctgaggatcttttgtatttctgtgggatctattgtgatgtcacctttattaatttctaattgtgcttgtttggatcttctttcttttttctttgttaatctagctagtggtctatcaatcttgtttatcctttcaaaaaaccaactttttattttatttacccttcatatgttgtttttttaaagaacaaacaatttttttaaaagatcaatttggatgaaacaatcttggagagaagaaaactttttaaaaaactgttatcaatattcttagaggggtaaaaaatgattatctgttcaggaagcaatatgagaatgctattaataaaaacccattcacagagtaacacaaaaataattcttgagatttaaaaataagatagcataaatgagaaactcaatcaaaaatttgtaaaatgaagtcaaggaatcatccagagactaaagcaaaaagaataagaggtcttttttaatggagaaaaaagctaagaaaattagaaagccagtcaagtctatgtagtcccatcccaagtaacaggaatttcttgaaagaaagaacataggattggaaggcacaattcactattttaaaaccctgaggtaatatggatagttataagcctccaagagaaatagcaaaggtcacaaagaaagtatagggaattatatgagctttagacttctgaatagctaaattggattaagactgtggagcaatgcctttaagattctgaagaaaattatttccatgatttccacattttcaaatgagcaaattctcaaaaactctccctcgcaagaagccactggagaacgcactccaccaaaatgagagatttcctcttcttccaagaacgggaagaaatgggattcaggaaacagaagatagggcagaggagacaggcgagaggaatgcccagtaaagagtgtcccagaatgacagctgttcagcaggtgtaaagcaaccagtccatgggagctgtgtgacctgagagttagctatgccaaggatgctcatcagcaagatccctgctgccaatgtacagttcttttaacttcaggaaagcatgcctgggtgagagtctcatctttacttggcttgacttaacttcgtgctgaagatgttccggctttcccttccactttcttctgtttggatcagctaagaacactcattttcctacatagaagtgcttctcttggcctactcctgagagttggagttaggccatgggagctttaaaggggaatagacagtagctcattacacctggcatactcttgccaaatatttagtacctggtccaaaccacaggcttgctagcttctctgactctggaaagccccgtgtttagcacaagtcactcctgactttccaagactcttaaaacttcaggtagctgaaaccaaactgtgactc

SEQ ID NO: 13954 - DNA, 704 bp, Homo sapiens
atgagtacatgggagtcgacccacgcgtccgcagactatcaggcccatttgtctcccctgcaccgagggaacaactcgagctttgaggcttcctccaactaccacttgccagcaacaaaaggaagagctgctccctgcacaggatatcaaagctctgtttgtgtctgaggaggagaaaaagctgactcggaaggaggtctacatcaagaatggggataagaaaggcagctgtgagagagatgctcaatatgccccaggctatgacaaagtcaaggacatctcagaggtggtcacccctcggttcctttgtactggaggagtgagtccctatgctgaccccaatacttgcagaggtgattctggcggccccttgatagttcacaagagaagtcgtttcattcaagttggtgtaatcagctggggagtagtggatgtctgcaaaaaccagaagcggcaaaagcaggtactatatgtatgtgacttccctccccctgccagaatactccttggtcaattgtaggtattctttttggtttaatttttgccaatgtaattaaaaaatggtatgtcatttttaaaatttgtatttctttcattacaaataagattgttatgtcagtattgttattggcttttcgtattcctcttaacgtgaaccgtctgttcattgtttttacctgttttcgttttagcaagtagtacct

SEQ ID NO: 13955 - DNA, 1490 bp, Homo sapiens
  misc_feature 1462, 1463, 1464, 1465, 1466, 1467, 1468, 1469, 1470, 1471,1472, 1473, 1474, 1475, 1476, 1477, 1478, 1479, 1480, 1481,1482, 1483, 1484, 1485, 1486, 1487, 1488, 1489, 1490: n = A,T,C or G
gcgtccgggggcactggccagcctggttccaggcccacatggcctagtcagtgcctcgaggagctggttcaggagctggccagattagatccctctctatgtgaccctcttgcttcccagcccagcccagagccacccctgggcctgctggatggactgattcctttagcagaggtccgggctgcaatgcggcctgcctgtggggaggctggagcccagggagctctggttttgttcccaggtcctatcagttcagcttcacccagctcctgccggctcctcgggaggagacaaggcttgaaaaccctgccacccaccctgtgcttgaccagccatgtgggcaggggctccctgcaccaaacaacagcatccagggcaagaaagtgtggagctggccgcccgcctccaaaagatgcttcaggaccttcacacggagcaggagcggctgcagggggaggcacaagcgtgggccaggcgccaagcggctctggaggctgcagtgcgccaggcctgtgcccctcaggagctggagcggttcagccggttcatggccgacctagagcgcgtgcttggccttctgctgctgctgggcagtcgcctggcgcgcgtgcgccgcgccctggcccgggcggcctcagacagcgaccctgatgagcaggcctccctgctgcagcgactccggctcctgcagcggcaggaggaggacgccaaggagctgaaggagcacgtagcgcggcgcgagcgggccgtgcgggaggtgctggtgcgagcactaccggtggaggagctgcgcgtctattgcgccctgctggcgggcaaggccgccgtcctggcccagcagcgcaacctggacgagcgcatccgcctccttcaggaccaactggacgccatcagggacgaccttggccatcatgccccgtctcccagcccggcgcggcccccagggacctgtcctccagttcagccgcccttccctcttctccttacatagttataggtggagagggtggggtgcaccgcccctatctctcacccacgtaagtggggtgatgctgatttagtctctgcttttcccttgagggattggggaggacccagtccaggcctttctaagatactcctccagccgggcgcggtggctcacgcctgtaatcccagcactttgggaggccgaggcgggcggatcacaaggtcaggagatcgagaccatcctggctaacacggtgaaaccccgtctctactaaaaatataaaaaattagccgggcgtggtggcgggtgcctgtattgccagctactcggaaggctgaggcaggagaatggcgtgaacctgggaggtggagcttgcagtgagcggacatcgcgccgctgcactccagcctgggcgacagagcaagactccgtctcaaaaaaaaaaaaaaaaaaaaaaaaaaaaaaaaaaaaaaaaaaaaaaaaaaaaaaaannnnnnnnnnnnnnnnnnnnnnnnnnnnn

SEQ ID NO: 13956 - DNA, 1924 bp, Homo sapiens
  misc_feature 1920, 1921, 1922, 1923, 1924: n = A,T,C or G
tgggaagtgaggtgtgggcagccggcggcggtctgatgaattcagtggcagtgaattgagaccggagggaatctggcccctagaggctggtacttgggcccgaaacccccatctccggcggagagaccgtccgaggtaattgtctgccacgagtgcacattctgaaaacaggagattttagttcctaaaaatgggaagaacctacattgtagaagagactgttggccagtatctttcaaacataaatctccaaggaaaggcttttgtctctggccttttaataggacagtgttcgtcacaaaaggattatgtgattcttgccactagaacgccacccaaagaggagcaaagtgagaacctcaaacatcccaaagctaagttggataacttggatgaagaatgggccacagaacatgcctgccaggtatccagaatgctaccagggggacttttagttcttggagtatttattattactactttagaactggcaaatgattttcaaaatgccctgcgtagactaatgtttgctgtggaaaagtctataaatagaaagagattgtggaatttcacagaggaggaagtctcagaacgagtgacacttcacatttgtgcttctacaaaaaaaatattttgtcgaacttatgatatccatgatccaaagagttcagcaagaccagcagattggaagtatcaaagtggattatcatcctcatggctttctttagagtgtacagttcacattaatattcacatcccactttctgctacttctgtcagctatactctggagaaaaatacaaagaatggacttacacgctgggccaaggaaatagaaaatggtgtttatttgattaatggacaagttaaagatgaagattgtgacctattagaaggacagaaaaaatcttctagaggaaatactcaagcaactagtcattcttttgatgtcagagtgctaacgcagttgctcctgaattcagaccacagatccacagccacagtccagatatgtagcggttctgtaaaccttaagggtgctgtgaaatgcagagcttatatccacagcagtaaacccaaagttaaagatgctgtgcaggcagtaaagagggatatattgaacacagttgctgatcgttgtgaaatgctatttgaggatctgcttttgaatgaaattccagaaaaaaaaagattctgaaaaagagttccacgtcctcccttatcgagtctttgttccccttcctggatccactgtaatgttgtgtgattataaatttgacgatgagtcagctgaagaaatcagggaccattttatggagatgttggatcacacaattcaaatagaagatttggaaattgcagaggaaacaaacacagcttgtatgagttcttctatgaatagtcaagcttcattggacaacacagatgatgaacaaccaaaacaaccaattaaaactacaatgttattgaaaattcagcaaaacataggtgtgattgcagcatttacagttgcagtccttgctgcgggtatctcctttcattacttcagtgattagggtgaggcacaaagagtttcttgatcatccagagaacattgacagacaattatgaataataaagatgttaacaatccatctgtatttaaaacactagcagccagatctgctgccatgatgcctatttggtgtgtttctgattaaaatgaaatcacaagctgcaaaaaacccccccccccccttgcttagcctgctttacattgtaggtggcccgcatttccagaaataacgttatgcatctagatggaagctgcatgtaacaaatcattattatctatttttaaaagcttcacaatgatgggatatgatcatagattttagtcttactaaatctgatcacatattaatcaggacattaaaaacnnnnn

SEQ ID NO: 13957 - DNA, 3535 bp, Homo sapiens
  misc_feature 3514: n = A,T,C or G
gggagtcgacccacgcgtccggctgggagtgtcgtggacgccgtgccgttactcgtagtcaggcggcggcgcaggcggcggcggcggcatagcgcacagcgcgccttagcagcagcagcagcagcagcagcatcggaggtacccccgccgtcgcagcccccgcgctggtgcagccaccctcgctccctctgctcttcctcccttcgctcgcaccatggctgatcagctgaccgaagaacagattgctgaattcaaggaagccttctccctatttgataaagatggcgatggcaccatcacaacaaaggaacttggaactgtcatgaggtcactgggtcagaacccaacagaagctgaattgcaggatatgatcaatgaagtggatgctgatggtaatggcaccattgacttccccgaatttttgactatgatggctagaaaaatgaaagatacagatagtgaagaagaaatccgctgaggcattccgagtctttgacaaggatggcaatggcttatatcagtgcagcagaactacgtcacgtcatgacaaacttaggagaaaaactaacagatgaagaagtagatgaaatgatcagagaagcacgatattgatggagacggacaagtcaactatgaagaattcgtacagatgatgcactgcaaatgaagaactactttcaactcctttttccccctctagagaatcaattgaatcttttacttacctcttgcaaaaaaaagaaaaaagaaaaaagttcatttattcattctgtttctatatagcaaaactgaatgtcaaaagtaccttctgtccacacacacaaaatctgcatgtattggttggtggtcctgtcccctaaagatcaagctacacatcagttttacaatataaatacttgtactaccttaatgataaggactccttaaagttccatttgctaatgattaatacactgtttgggctggccagtttttcatgcatgcagcttgacgattgagcacagtcaggcctttgtattaaaaatgaaaaatgaaaaaacaaattcaaaacctattcaaatgggttctagttcaatttgaataggttttgaatttgtcatagctggtttactgaaaacaaacacatttaaaattggtttacctcaggatgacgtgcagaaaaatgggtgaaggataaaccgttgagacgtggccccactggtaggatggtcctcttgtacttcgtgtgctccgacccatggtgacgatgacacaccctggtgggcatgcccgtgtatgttggtttagcgttgtctgcattgttctagagtgaaacaggtgtcaggctgtcactgttcacacaaatttttaataagaaacatttaccaagggagcatctttggacgtaaactgtaatttctttgaacagcaatgttgatggttgtgctgaagtccacagccacagcctactctgccggctccaagtcatggttcagaaggttttaaaaacagagagtccaaagatgctcccttggtaaaatgtgtccttattaaaaatttgtttgaacagtgacagcctgacacctgtttcactctagaacaatgcagacaacgctaaaccaacatacacgggcatgccaccagggtgtgtcatcgtcaccatgggtcggagcacacgaagtacaagaggaccatcctaccagtggggccacgtctcaacggtttatccttcacccatttttctgcacgtcatcctgaggtaaaccaattttaaatgtgtttgttttcagtaaaccagctatgacaatttatactaaacaaattgaactagaacccatttgaataggttttgaatttgttttttcatttttcatttttaatacaaaggcctgactgtgctcaatcgtcaagctgcatgcatgaaaaactggccagcccaaacagtgtattaatcattagcaaatggaactttaaggagtccttatcattaaggtagtacaagtatttatattgtaaaactgatgtgtagcttgatctttaggggacaggaccaccaaccaatacatgcagattttgtgtgtgtggacagaaggtacttttgacattcagttttgctatatagaaacagaatgaataaatgaacttttttctttttttctttttttttgcaagaggtaagtaaaagattcaatttgattcttctagaggggggaaaaaggagttgaaagtaggtcttcattttgcagtcatcatctgtacgaattctgaaaagacaaatataatagtaacttttggttatctttgaaaacagctttaatgaacacaacatctttactgtacataaaataaagtcaaaggctgtctagtgaagcagttggcttgcttacagatctaaaggtaagactatgaaacactgagctcagagaatttagttttaccttcatagttgacttgtccgtctccatcaatatctgcttctctgatcatttcatctacttcttcatctgttagtttttctcctaagtttgtcatgacgtgacgtagttctgctgcactgatataaccattgccatcctgtgaacattcagcaattgttattgctaatgatgtagtgtggggaagtaggtctttgacttagctatgccctctcaagttactgctaactctgctgccataaacaattctctgatctctagttcccacctctaacctactaaatacatgcaaacagctaatgcagaaaacaggatttgcaaaagctcacaacaattcaaagtaacagtcaagaaacatggtccaaaattcctatttattatgcctaccctcccctgatacggttaccataaggaggatttttgaaagggagatcagaggctcaggcagttagatttaagtcttctgtctataacattattatagcttttagaagtgaaagcggaagaagccatacttaagtaccatctgctatgtagatgctggattaccttgtcaaagactcggaatgcctcacggatttcttcttcactatctgtatctttcatttttctagccatcatagtcaaaaattcggggaagtcaatggtgccattaccatcagcatccacttcattgatcatatcctgcaattcagcttctgttgggttctgacccagtgacctcatgacagttccaagttcctttgttgtgatggtgccatcgccatctttatcaaatagggagaaggcttccttgaattctgaaaacaaaagttgacccgttagaatcaatgtctttatccaacccagtcacaatacacacttgccgggggcttgccaaagccagccattcaagttgtgcaacgtatcagaagtctggtctttatctactgaaataatgaccacaatagtcctgttggactggccttcatacagcagcccataaagcaaacactgctcccaataaacagtgccacacaccacaatattcccaaaggtttcaaggcggctaagctggaacatgcttaaattagtcctaaatccaatctttttttttttcnccacgcgtccgcggacgcgtg

SEQ ID NO: 13958 - DNA, 2501 bp, Homo sapiens
  misc_feature 2498, 2499, 2500, 2501: n = A,T,C or G
gcgtccggaaagcgccccgggaactgggccgctgggccagcccctgcgtcggggggcaagatggcagcccaggctttggcgctgctgagagaggtagcgaggctggaagcgccgctggaggagctacgcgcgcttcactccgtgctgcaggcagtgccgctcaacgagcttcgccagcaagcggcggagctgcgcctcggcccgctcttctccctgcttaacgagaaccatagggaaaagactactttgtgtgtatccattctggagagattgctccaagctatggaaccggttcacgtggcccggaacctcagggttgacctgcagaggggactaattcaccctgatgattctgtaaaaatcctcactctttcccagattggaagaattgttgaaaattctgatgctgttactgagattctaaataatgctgaattactaaaacaaattgtttattgcattggtggagagaatctatctgtagcaaaagcggctatcaaatccctgtcaagaatatcactaacccaagctggactggaggctttatttgaaagcaatctgctggatgatttgaaaagtgtaatgaaaacaaatgacattgttcgatacagggtgtatgagctaattatagagatttcttccgtgtcaccagaatctttaaactactgtaccacaagtggattggtaacccagctcctgagagagctgactggtgaggatgtgttggtcagagccacctgtatagaaatggtgacatcactggcatatactcatcatgggcgacaatatcttgctcaagaaggagtaattgaccaaatttctaatataattgttggggcagattcagaccctttctctagcttctatctgccaggattcgtgaagttttttggaaacctggctgtcatggatagtcctcaacagatctgtgagcgttatcctatctttgtggaaaaagtctttgaaatgatagaaagtcaggaccccactatgattggtgtagctgtagacacagttggaatcttgggatccaatgttgaaggaaaacaggttttacagaaaacaggaactcgctttgaacgcttgcttatgagaataggacatcaatcaaagaatgccccagtggagctaaaaattagatgtttggatgcaatttcatctcttctgtacttaccacctgagcagcagactgatgaccttctgaggatgacagaatcctggttttcttctttatctcgggatccactggagctcttccgtggcattagtagtcagcccttccctgaactacactgtgctgccttaaaagtgtttacggccattgcaaaccaaccctgggctcagaaacttatgtttaacagtccaggttttgtagaatatgtggtggaccggtctgtggagcatgacaaagcttcaaaggatgccaaatatgaactagtgaaagcacttgccaattccaagacaattgcagaaatctttgggaacccaaattatttgaggctcagaacttacctgagtgaagggccatactatgtgaaacctgtttccacgacagcagtagaaggagccgaatgatttcttctagagctcatgtagaggaccacgttttgaccaaaacttctcctaaggcatttgactccatctatatttcacaaaagagacttcctttccccaagaattatcatggaatgtcagatgttactttgttaccaacactgttatatttctacattgaaatgcaaagtggaactaggagtttggaatgcattaagagcagacaagcttggtcataatagatccagtgtttttcagattcctttcactgccttaatctttgcaacagggtggaagtttttttcttccctcaaaattttcatggacatgcaatcttatctaaaagcctgcttcagggctgggcgcggtggctaacacctataattcccagcactttgggaggccaagatgggcaaatcacttgagtctaggagttcaagaccagcctggccaatatggcaaaaccctgtctctactaaaaatataaaatcagccaggcatggtggcgcacacctataatctcagctactcaggaggctgaggcacgagaatcgcttgagcctgggaggcagaggttgcagtgagctgagatcttgccactgcacaccagcctgggcaacacagcaagactctgtctcaaaaataaaatgaaataaacatagaaacctgcgcaccaaattatttctggattctcttcactatctttttttttctttttggtcctttttccatttctgattccactttcaaagtcctggatatattctctggacactgggtggcctggggacaattgcaactttttcgctatacgccgaaaaaacctcatgaaaggcccccgtggtctggtgccataattccctcggaaaaagaccaccttcttccacagggttcagggtcccgcgatcggggcgcacccgaacattgccgcgtggctgcggcannnn

SEQ ID NO: 13959 - DNA, 353 bp, Homo sapiens
  misc_feature 353: n = A,T,C or G
acagttccatctttggccataaggagacaatgatgtcaagaggctaaggccatatgatctgtaggtgaaaaacctgggatgagaatcaaggcctcaaactttttccactacatcacagatttaggagcagttagagggaaggcttcaatctggagaacactaacaggctctagagattattgggtcatggtggctgggacagaaataaggattcacagaaagatgtttgttgtcaatgttcttttacagtaaatgttcttttgagattttgcttgataaaaaggttgagcagaagtgaaaaaaatttttttctttttttctttctttttcttttctttttgcttttttttttn

SEQ ID NO: 13960 - DNA, 1913 bp, Homo sapiens
  misc_feature 1, 2, 1908, 1909, 1910, 1911, 1912, 1913: n = A,T,C or G
nncatgtttgcacccgcggtggatgcgtgcttttcgcaagaacaagactctcggctatggagtccccatgttggtgtactaggatctgtctgcttgtgagcgtggcgtctttcccatcgtcgaacgcggtcattgtgaagagtaaaatggatcctgagcttgaaaaaaaactgaaagagaataaaatatctttagagtcggaatatgagaaaatcaaagactccaagttgatgactggaagaatattcgaggacccaggccttgggaagatcctgacctcctccaaggaagaaatccagaaagccttaagactaagacaacttgactctgctgattcttttttccttttttttttttttaaataaaaatactattaacgggacttcctaatatatacttctatcaagtggaaaggaaattccaggcccatggaaacttggatatgggtaatttgatgacaaataatcttcactaaaggtcatgtacaggtttttatacttcccagctattccatctgtggatgaaagtaacaatgttggccacgtatattttacacctcgaaataaaaaatgtgaatactgctccaaaaacagagtcacgtattccactctccaactacccacatattccttttgcaatagccattagggcatcattttgatatttcattctgatttctgattctctgatttctgattcctaatgaggacagtaggtctggatccaaattctcacagtaaaatcaagcagtaattttctctcatatctattagggaaagaaaaatgatcacagtctgctaagagtcttgattttctttgtaatgcctcacatagtatgataatcagtctccaaagcatcacatgataattacaatgataccattaacatgtcgagggaattatattatttatggttgtcaaaaattatgaaaggggtgtatgattataagcagatatggcgaatttgtgcagtaaatccatagatgactacattttgagaaatactaagataatactaaaaattatgccttagcatagtttgcatgcattttttgccctctgacgggtctttttttttttgagacggagtctcgctctgtcgcccaagctggagtgcagtagcacggtctcagctcattgcaacctccgcactctcccaggtattcacgccattctcctgcctcagcctccctgtgactagctgggactacagttgctgattgttggaggttcttttggtcttcgtgagttttctcaaatccgatatgatgctgtgaagagtaaaatggatcctgagcttgaaaaaaaactgaaagagaataaaatatctttagagtcggaatatgagaaaatcaaagactccaagtttgatgactggaagaatattcgaggacccaggccttgggaagatcctgacctcctccaaggaagaaatccagaaagccttaagactaagacaacttgactctgctgattcttttttccttttttttttttttaaataaaaatactattaacggggacttcctaatatatccttctatcaaggggaaaggaaattccaggcccagggaaactgggatatgggtaattggatgacaaataatcttcactaaaggtcatgtacaggtttttatacttcccagctattccatctgtggatgaaagtaacaatgtggggccacgtattttttacacctcgaaataaacaaagtgtgacatacgggtccaaaaaaaaaaaaaacaaaaaaacaaaaacaaaacaaaaaccaaaaacaaaacaaaaaaaacaacgaacacacccccgcggcgcgcactactcggggggggcggcaaaaacgcggcgcaagcggcggcgcggcgcccacccggtccccgccgccgccttccgccccgcgcggaaatacnnnnnn

SEQ ID NO: 13961 - DNA, 1664 bp, Homo sapiens
  misc_feature 1, 2, 3, 1661, 1662, 1663, 1664: n = A,T,C or G
nnnatggcggggtccaggtggaggtcttgaggctatctcgtcggtgtaaagcaggccctctggctcaccaagaccaagttaatagaaggccttcccgagaaagtgcttagccttgttgatgatccaaggaaccacatagagaaccaagacgagtgcgttctgaatgtgatctctcacgcccgtctctggcagaccactgaggaaatccccaagagagagacctactgcccggtcatcgtggacaacctaatacagctgtgtaaatctcagattctcaagcatccttctctggccaggaggatctgtgtccaaaactccacgttttctgctacctggaaccgagagtctcttctccttcaagtccgtggttctggtggagcccgactgagcactaaggatcctctgcccaccatcgcctccagagaggagattgaagctactaagaatcatgttctagagaccttctaccccatatcacccatcatcgatcttcatgaatgcaatatttatgatgtgaaaaatgacacaggattccaggaaggctatccttacccctatccccataccctgtacttactggacaaagccaatttacgaccacaccgccttcaaccagatcagctgcgggccaagatgatcctgtttgcttttggcagtgccctggctcaggcccggctcctctatgggaatgatgccaaggtcttggagcagcccgtggtggtgcagagcgtgggcacggatggacgtgtcttccatttcctagtgtttcaactgaataccacagacctggactctaacgagggtgtcaagaatttggcctgggtggactcagaccagctcctctatcagcatttttggtgtctcccagtgatcaaaaagagagtggttgtggaacctgttggcccagttggtttcaagccagagacattcagaaagtttttagctctatatttgcatggtgctgcgtgagcggaggacccctctgaatcctgaaacccctcttgcctctcttccacggaagagggcctgggccccgtggagcctcagtgcccgtttggcctgctgctctcgctgacaataaagagcccttgcgttgcaaaaaaaaaaaaaaaaaagaaaactcgcgcgccacacaacaatcgcggggatgcgcgacacacacaggacacagaacgcgcccagtgccaacggtgatccccggaccccagctccatggacccaaagtggcgcaacacgccggggacccccatatacacggaagccggcaaacaattcgggaacagcccaggtaacccggcctatgacagtccagcagaacgacaccaaacacaaaaagcagaacaccaacaagacaccgcaggacacaacacacaacccacacccacagacagagaagaaagagcaacgagcagccaggaaaaggcaaccgggagaaaccaaagaggggcaagaagacaaacagaagcgggcagacggacgcgagaccaaggcgagaagcggacgagaaggggggagccgcgcgcacagacgcacggaagcgacgcaccagaaacagcggacaggcaccaacacagacgagcgaagcaaggcggggcagaggagagaaaacagaacgacagaaaggggaacagagcgggaggcggaagagaaaaagagcagannnn

SEQ ID NO: 13962 - DNA, 2518 bp, Homo sapiens
  misc_feature 1133: n = A,T,C or G
acctaccctggagtgcagtagcacaatcctaatgaactgcagccttaaactcctgagttggagatcctcccacctcagcctttcggttgccaagactacaggcacatcaccacgcctggctcatttgagaaatatttttctgtagacgtggggtctcactttattgcccaggctggtccttggtctcatgtgatccttctgcctggactgggattacaggtgtgatcaccatgcctggcctagaatttaataaaaattctgagatttcctttgtgtagcagatgttgaatgttactgttattggctgtcactgtatttgaaggatttgtatgtgtaccctctgttgagttttggggacatagcagtgatccagatgacttaaggtcttgccttcatggacctgccagcctagttggggagaaggactgggcccaataccagaagctgatccaaagtggtcagaactggggaaggagacctgtgagctgaaagcaggtaaaggaagtatccagacagaggcactggtaaaagacctggagctgggaagggtctagggaccagggacaggttgtactgtaattctggaaacctgtgaggctcaaagaaagggcagagagctcaggtgggaaatagaaaaggcacctgaacagtccagggatggctttcgactacttgaaacagccttgggagtttcagaagctattggaatgctccttactgttcagccttctaagaaccagtcttagaggtagggtgtctgaggtccagtgagggacacaagtaggagggagcccagatcttgttccctttaccttgcctatatttcttaacaccacttcagcagtctcatatctggcttttttgactttcctcttctctgggtctgtagagggccttggagtgacaccctgacccccatccactagtacttgaaggccagtggtggcagaagccacagaaacaagaagcccagtgagatggctaagctgcccagcatgtaacttaaatccctgttcattccccattcctttagctgctggagccagttctgcttctcggcaaggagcgatttgctggtgtagacatccgtgtccgtgtaaagggtggtggtcacgtggcccagatttatggtnagtcccaggaactgggtcgcatggaggaggtggctctgggagggaggccttcacagcgctcctgtaccctttaattgtgtgtctttctcacagctatccgtcagtccatctccaaagccctggtggcctattaccagaaatgtgagtgagcatgggtccttcccatgaggtagatgggtgtgtggggatcaagtcaaggactctgtgtgattatctaaatcctcgtccctgctcttcttgccagatgtggatgaggcttccaagaaggagatcaaagacatcctcatccagtatgaccggaccctgctggtagctgaccctcgtcgctgcgagtccaaaaagtttggaggccctggtgcccgcgctcgctaccagaaatcctaccgataagcccatcgtgactcaaaactcacttgtataataaacagtttttgagggattttaaagtttcaaaaaaaaaaaacacaacaacaaacaaaaaaaaagccccgggggcctctcattgcgggggggggaaaaagggggtttttgaatgggcccttggcgtccaatgtgtgttccctggacccaaggtcttctcttggtcccacactgggggtgaaaatctggccgggtcatcccaataacgggagcccgctatacaatcgcggaaaacggccagggttaaccgtggttttagtgacctccggggaaaaccacaacggcgcacacagcacgcagccacgcacacaggtacagcgcacacacacacccaccgccgaacgaggcagcagcacccaactaagagaaccacaaaactgcagcagacaaaggaacaaagacgagaagcacaaggacacaaactaacaccacaaaacaagtagaacacaacacaacaataccatataggagcaaccaacaccccacacaacacaccaagaacaacaaagagacagacaagacgcacagacaacacaacgagaaacaatagacgagcaaacacaaaaagtcgacaacacaataatagggccaaaaagtaggagccgcaaacctacacaaagtaacaacgaccaacacggaaacagaagaagaacagacagaaagacatgtgtccaccaacagccactgaacaccaaggaccaacacagacgcaagctcacaacacagcgaggacgcgactcgcgcaaacacaatgacgagtcccaacccgcgacacacacacccacacgaagcagatagagacacgcaccgagccatcgtgtcgcccagactcgcacgaccgcaagccaacacagcgccgatcgcagaataacaaacactcgagacaaagaatgaacatatccacccgagcagcaccgcacgtcctagagaagcgcgcacaacagcgaagaagcagacatcgacga

SEQ ID NO: 13963 - DNA, 2221 bp, Homo sapiens
  misc_feature 2162: n = A,T,C or G
cgtccgcggccgcgtgggtcgccccgcgtccgtctgcttgcacttaggcgacctcgggagctcggactcctacgcagtcaccgggaagggccgccgccccgcccgcggctgctggcccgggtgacacttccgcctgctataagagcagcggccctcggtgcctccttcctgacctcgcacccagctcggagcccggagcgtgcctcggcggcctgtcggttttcaccatggagcagctgagctcagcaaacacccgcttcgccttggacctgttcctggcgttgagtgagaacaatccggctggaaacatcttcatctctcccttcagcatttcatctgctatggccatggtttttctggggaccagaggtaacacggcagcacagctgtccaagactttccatttcaacacggttgaagaggttcattcaagattccagagtctgaatgctgatatcaacaaacgtggagcgtcttatattctgaaacttgctaatagattatatggagagaaaacttacaatttccttcctgagttcttggtttcgactcagaaaacatatggtgctgacctggccagtgtggattttcagcatgcctctgaagatgcaaggaagaccataaaccagtgggtcaaaggacagacagaaggaaaaattccggaactgttggcttcgggcatggttgataacatgaccaaacttgtgctagtaaatgccatctatttcaagggaaactggaaggataaattcatgaaagaagccacgacgaatgcaccattcagattgaataagaaagacagacagaaaaactgtgaaaatgatgtatcagaagaaaaaatttgcatatggctacatcgaggaccttaagtgccgtgtgctggaactgccttaccaaggcgaggagctcagcatggtcatcctgctgccggatgacattgaggacgagtccacgggcctgaagaagattgaggaacagttgactttggaaaagttgcatgagtggactaaacctgagaatctcgatttcattgaagttaatgtcagcttgcccaggttcaaactggaagagagttacactctcaactccgacctcgcccgcctaggtgtgcaggatctctttaacagtagcaaggctgatctgtctggcatgtcaggagccagagatatttttatatcaaaaattgtccacaagtcatttgtggaagtgaatgaagagggaacagaggcggcagctgccacagcaggcatcgcaactttctgcatgttgatgcccgaagaaaatttcactgccgaccatccattccttttctttattcggcataattcctcaggtagcatcctattcttggggagattttcttccccttagaagaaagagactgtagcaatacaaaaatcaagcttagtgctttattacctgagtttttaatagagccaatatgtcttatatctttaccaataaaaccactgtccagaaacaagtctttcattttctttgtaagtttggctctgttggctgtttacacccatgaattttggcatgggtatctatttttcttttttacattgaaaaaaatccagtggttgcttttgaatgcatcaagtaaagaagaagaaaagaatacatccgatgcgtagattcttgaccatgtagtaatctataaaattgctatatcctcctgatagccatgggaaaacatgataagatggtgatttattttgcagttagaattttggaagccacaaaatagacagacaccctgactgttgaagggaggtttaaaaacagatattcaattgaaatgtaagagagcaccccaattgagagcccaggttacgaagacaagcttgcctcgcctgacttttctgtcccttgttctgcaggattagtattctgttacagacctctagtttttagactcttcaattaaagggccaatggttataacctgcattcccttttttgttcttctttatgtataatatatagttcatgtggcgctgcatgaaatcaagaagtgggtgtcttaggataaaagataccaagagtctacaaaaataaccatgtagtaagataaactgctgaacaaaggttttactgttagccaccttctcatgtgttttcttttctctttttctttttctttctttctttctttnttttttttttgagacagagtcttgctctgttacccaggctggagtgcagtggcacgatc

SEQ ID NO: 13964 - DNA, 559 bp, Homo sapiens
  misc_feature 1, 559: n = A,T,C or G
nccagcggggtcgcgtagtgtcatgaccagggcgggagatcacaaccgccagagaggatgctgtggatccttggccgactacctgacctctgcaaaattccttctctactttggtcattctctctctacttggggagatcggatgtggcactttgcggtgtctgtgtttctggtagagctctatggaaacagcctccttttgacagcagtctacgggctggtggtggcagggtctgttctggtcctgggagccatcatcggtgactgggtggacaagaatgctagacttaaagtggcccagacctcgctggtggtacctgcccgggcggccgcccgggcaggtacccgcgcagactttccctgccggcacatgggcctggcccaaccctcacagccagtagccgtgctggagctctcggtgctcgagcggcagccagaagagaacacgcctctcaatggtgccgacaaggtcttcccttctttggacgaggaggtccccccggccgaggtaaggtccccttggcgctggccctaacttgccggcggcgggacagttagn

SEQ ID NO: 13965 - DNA, 2622 bp, Homo sapiens
  misc_feature 975: n = A,T,C or G
agtcctcgaagagtaactgctgaccttattcactggctgtgggccttatggcacagtcagtcaccaggttagagacatgcttcacgattcacctacccacaaactagtggatgataaattttggctattcagaagacgtttattataggagtatgtagattttccatagagtgctgttatgtgacttgaattttagtctcggccctgcctctgacattgtcggtggtttatcctggttccaggaaataagactagccttttcctcatgatagtctttggtggtttttaaaacagttgtttaagtcaacagatgtatcatatgcctgacactgctctacaccagtgaataatttacactctaatagggggtggtaactataaagatgataaacatagcatcttaattggcagtgtgtactgaaggtggttgttacctcttcctagccacccaggctactttgggaaagttggtatgaagcattaccacttaaagaggaaccagagcttctgcccaactgtcaaccttgacaaattgtggactttggtcagtgaacagacacgggtgaatgctgctaaaaacaagactggggctgctcccatcattgatgtggtgcgatcggtaagttaattggatgtttttctgtacttccataccttcccttacaaaactctggcttaatctaatccacttatataatctgtacttcccagttacctaccagacattgatattcttcctgtggtagaattatcataggtagttccctatccgtagcagtgcctactgtcactgcccaggttgtatcaggtttgcatttcgtgcttgaactatagctggttttcactgagcacagctcttggcccttcatgttctccagataatagaatcctaatatgttccattgatactcagtgccatgcattatctgaagagattttcccccaaaacagatgtattatgtctgtccttgcggnggttctggtccctgtgtcagtcttaactctcatgaatatagaggtagtgttaagaggccagaaccctagggacgctttaaattcacttcccagcctatttaatgtccattgagtagttctggtggtcaggaaggtggttgtcttcttttgcttagcagggggtatttgagcaggaggaggcttatgctttgccgagactagagtcacatcctgacacaactcttgtcctggtgtgctagagtactcgaagagaatctactggtcttgattcactggtgggggcagtcagtgcccccgttagtgcccagatcagaaacatacataccctgcctagggatttagaaagtgggttggcagtctttcctcacgcccatcacgcagttggtacctactacagtgtattgtaaacttttttctctgttcttctagggctactataaagttctgggaaagggaaagcaccggaagcagcctgtcatcgtgaaggccaaattcttcagcagaagagctgaggaatttggccttcacgatgacaggctactttgggaaagttggtatgaagcattaccacttaaagaggaaccagagcttctgcccaactgtcaaccttgacaaattgtggactttggtcagtgaacagacacgggtgaatgcgtccgtctcttttataagactttacagtttcttagtgagaagagagttccaaaaagttctgggaaaggcaattttgaacttattccctgattccttaaacacaaataaaggctagaaagtccctatttcacaaatgcttactgagtacctaatatgtgcaagggactattttaatcaccacaaaaattcatcttcgcaagagccataaaattaattacagtgaggaaaaacaacattctttcttctatttattattgtaatacccgatctccttattggcgaaagaacaatggagtcaggattgcctttctttcagggtgtaaaattgactttaaaaagtggctgaaactaaacaaattattttacatatcctggtcttgaatgcagctgttatttctttatgctgttagaaccatttcgtagccccagacttcactgataaaataaaatggaacttactcatttttcctgctgccacttcttaagatgagattctctttccaacaaacttgattctatttgagtgatttcatggatttaaggacttcaggttacataaaacgtgatatcatctaagccttaattaaatttttattaggtgtcacagcaatattcttgcaagtgataaaagaaagcctttttaaagtcaagttgcatttttggaaggctgtgatcatttttgttgagacagtgatcctaacatggtttcctgtattggtagtatagattctcaactcacttatgcacctactgattgtcttcccccatgcctataaatgagctcaaatctcctttgccggcaaaaaaccctctcttctcttatgttcccctctggccactccctctctgtcatttacttcccaaccatactcttttttttgttttcttttcagacagggtctcttaaaaaaggaagaagaaagaggaaacaggaaagaagaggaaggaaggaagacagggaagaaaagagggagggaaagaaatgagcggacg

SEQ ID NO: 13966 - DNA, 636 bp, Homo sapiens
  misc_feature 190, 191, 192, 193, 194, 195, 196, 197, 198, 199, 200, 201,202, 203, 204, 205, 206, 207, 208, 209, 210, 211, 212, 213,214, 215, 216, 217, 218, 219, 220, 221, 222, 223, 224, 225,226, 227, 228, 229, 230, 231, 232, 233, 234, 235, 236: n = A,T,C or G
  misc_feature 237, 238, 239, 240, 241, 242, 243, 244, 245, 246, 247, 248,249, 250, 251, 252, 253, 254, 255, 256, 257, 258, 259, 260,261, 262, 263, 264, 265, 266, 267, 268: n = A,T,C or G
gtccgtctacaatgaggctccctgctcagctcctggggctgctaatgctctgggtctctggatccagtggggatattgtgatgactcagtctccactctccctgcccgtcacccttggagagccggcctccatctcctgcaggtctagtcagagcctcctacaaagcaatggatacaactatttggattnnnnnnnnnnnnnnnnnnnnnnnnnnnnnnnnnnnnnnnnnnnnnnnnnnnnnnnnnnnnnnnnnnnnnnnnnnnnnnnctgcatgcaacctctacaaactcccctattcactttcggccctgggaccagagtggatatcaagcgaactgtggccgcaccatctgtcttcatcttcccgccatctgatgagcagttgaaatctggaactgcctctgttgtgtgcctgctgaataacttctatcccagagaggccaaagtacagtggaaggtggataacgccctccaatcgggtaactcccaggagagtgtcacagagcaggacagcaaggacagcacctacagcctcagcagcaccctgacgctgagcaaagcagactacgagaaacacaaagtctacgcctgcgaagtcacccatcagggcctgagctcgcccgtcacaaagagct

SEQ ID NO: 13967 - DNA, 2566 bp, Homo sapiens
  misc_feature 1, 2, 3, 2490, 2495, 2498, 2516, 2545, 2562, 2566: n = A,T,C or G
nnncaaatcgaaggccgggcgcggtgactcacgcctgtcatcctagcacttgggaggccgaggcggctgaatcacttgaggttaggagtttgagatcagcccgggcaacatggtgaaaccccgtctctacaaaaatagaaaaattagccgagcgtgatggtggatccgaggcaggcgttggttctgtgcgcctcaggagtataatgtctcaggaaggcgattatgggaggtggaccatatctagtagtgatgaaagtgaggaagaaaagccaaaaccagacaagccatctacctcttctcttctctgtgccaggcaaggagcagcaaatgagcccaggtacacctgttccgaggcccagaaagctgcacacaagaggaaaatatcacctgtgaaattcagcaatacagattcagttttacctcccaaaaggcagaaaagcggttcccaggaggacctcggctggtgtctgtccagcagtgatgatgagctgcaaccagaaatgccgcagaagcaggctgagaaagtggtgatcaaaaaggagaaagacatctctgctcccaatgacggcactgcccaaagaactgaaaatcatggcgctcccgcctgccacaggctcaaagaggaggaagacgagtatgagacatcaggggagggccaggacatttgggacatgctggataaagggaaccccttccagttttacctcactagagtctctggagttaagccaaagtataactctggagccctccacatcaaggatattttatctcctttatttgggacgcttgtttcttcagctcagtttaactactgctttgacgtggactggctcgtaaaacagtatccaccagagttcaggaagaagccaatcctgcttgtgcatggtgataagcgagaggctaaggctcacctccatgcccaggccaagccttacgagaacatctctctctgccaggcaaagttggatattgcgtttggaacacaccacacgaaaatgatgctgctgctctatgaagaaggcctccgggttgtcatacacacctccaacctcatccatgctgactggcaccagaaaactcaaggaatatggttgagccccttatacccacgaattgctgatggaacccacaaatctggagagtcgccaacacattttaaagctgatctcatcagttacttgatggcttataatgccccttctctcaaggagtggatagatgtcattcacaagcacgatctctctgaaacaaatgtttatcttattggttcaaccccaggacgctttcaaggaagtcaaaaagataattggggacattttagacttaagaagcttctgaaagaccatgcctcatccatgcctaacgcagagtcctggcctgtcgtaggtcagttttcaagcgttggctccttgggagccgatgaatcaaagtggttatgttctgagtttaaagagagcatgctgacactggggaaggaaagcaagactccaggaaaaagctctgttcctctttacttgatctatccttctgtggaaaatgtgcggaccagtttagaaggatatcctgctgggggctctcttccctatagcatccagacagctgaaaaacagaattggctgcattcctattttcacaaatggtcagctgagacttctggccgcagcaatgccatgccacatattaagacatatatgaggccttctccagacttcagtaaaattgcttggttccttgtcacaagcgcaaatctgtccaaggctgcctggggagcattggagaagaatggcacccagctgatgatccgctcctacgagctcggggtccttttcctcccttcagcatttggtctagacagtttcaaagtgaaacagaagttcttcgctggcagccaggagccaatggccacctttcctgtgccatatgatttgcctccagaactgtatggaagtaaagatcggccatggatatggaacattccttatgtcaaagcaccggatacgcatgggaacatgtgggtgccctcctgagaatcttgaggcactgtgaaatttaagtgtaagacattgagccacaaacatggaatctcttctttgtactggatgtccacttcccttaaagtcttatttgcacccttacaaaatctttccaaaggtcactcttatgaatggatgttggttatacttttaatggacattaacattcctaataaagtattagtttcttaattcacttttatatgttttggaaagaaaattagtgaacttctctatgttaaaaaatacgtactgcttgagtaacccctgtctgaaaatgcctggggaccagaaagtgtttcaacttttgggatttttttgaaatttttgggaatattttgcatagcaataatgagataccttgggaatgggacccaaatctaaacacaaaatcatttatgttcatatcaccttatatcaatacctaaaggtgattttatatgatattttgagnatttnatnatgaacaaagtttgcagncttttgccggtgatcacacatgagtcagnatggaatttcattgganacan

SEQ ID NO: 13968 - DNA, 287 bp, Homo sapiens
cgtacatgcaagctactcttgctctttggatccatggctgaatctggacaccagcagtgaccagctctagagtaaaaaaatcaggaagggggctggccacactgggttggagaatcagacttggggataccatgccatgaggtgtgtggcctctgggcaacaaaacaacaccagtttagactcatctccttgaaacagaaggaaaagccaggcttgaaaacatgggttagaacaaggaatcttgggccaggcgcagtggctcaggcctgtaatctcagcactttggg

SEQ ID NO: 13969 - DNA, 1212 bp, Homo sapiens
gcgcttcaggtcatcgcttgctctcgttcccaggctttggcttctagtggacgagaatcaccgagtctgcggggctggatgctgaccgcccggaccagcacctaggcgggcgggagctgtgcggcccagggttcgcgcgggccgggtagaggctcgagctgggacccccgagcgtgaaccccggagccggcggcgctggggccagaggggccgggagccccagggaggcggatctgggccccgagaaggacacccgcctggatttgccccgtaggcccggcccgggcccctcgggagcagaacagccttggtgaggtggacaggaggggacctcgcgagcagacgcgcgcgccagcgacagcagcccggcccggactctcgggagccgtggggcagaggctgcggagccccaggagggccggagccctcatgacttcagtgacctgcttctgcccctctaggtctatcagccacagtctctgcatgtttccaagagcagcagaaaatgaacacattgcaggggccagtgtcattcaaagatgtggctgtggatttcacccaggaggagtggtggcaactggaccctgatgagaagataacatacggggatgtgatgttggagaactacagccatctagtttccctggcttatgaggtggcaacatcttgtacttcggagattctgaagccgagcaacttgcccaagtccttcttcttttcccattaacaagatatgatatcaccaagccaaacgtcatcattaagttggagcagggagaggagctgtggataacgggaggtgaatttccatgtcaacatagtccaggtaagttagtagagtatcaaatgttaaaaaatgctcatcccagacctttgggagtgactaaagagttgtttatatgtactcggtaccctcagtgacacctcccaacccccaaatatcactttccttcccgcacacatacatgaactcttttgtttattttatatttgatttacattggtagggattttttcattctaacctatactggggacccattcacttcctcttcctccagcattatcggtcacttatttactccctcaccattagagaattgttgtgggctgtttgtttgtacaattatcctgcctcagcctcccaagtagctgggattacaggcatgcaccaccatgcccggctacttttgtatttttagtagagattgg

SEQ ID NO: 13970 - DNA, 1015 bp, Homo sapiens
  misc_feature 1, 2, 3, 1011, 1012, 1013, 1014, 1015: n = A,T,C or G
nnnctacccagggtcgacccacgcgtccggccctctcgtggttcattgtcaccatgtccctgctgtgcccactgctgctggctttagccctggtggctgtccctggtgcccatggcaattgcccggtgcccgcagacctgaagaagtcagatgggacgcgtacgtgcgccagactctatgagaagagtgatccatactatgacaactgctgccaggggcccgtgttgtctgtggagccaggtactgacctgccctatctgccctcgggctggtctaacactgcatcgtctctggtagtgggccagcgctgtgagatcactgtgtggtctctccccggtaagcatggcaagacccgcaagttcaccgcgggttcttaccctcgcctggaagagtaccgcaaaggcatctttggagactggtccgactccatctctgccctctactgcaagtgctattgatgccttgaggctctgtctacccagcctggccttgggaattgctgtagctccaagagccaggaggcaagatgaccccacgacctgctctcatagcttccctgtaatacagccctttcaaagttaaaaaaaaaaaaaaaaaaaaaataaaaacaacattgacacacaaacagaaaaaaagaaaacaaaaaacaaaaagggggggggcgacgagaaacaccagcggggagggaccgcgaaaatggcaagacccaatcttgttgatgcagcgaggccccacagcccgggagctaaacaacaacgagagcgtcgacggaaaacaaagggaagcggaacagacgcacggggaaagcgaggacacctcgccgcgggcacagggcaccaccacgaacgatcaagcccgacaaaacacatcgtgaggccaaaccagagccgcaacaagatggagattactaaataagccgaagagaaagaacgagagagcaagacaacaatcacaagacgacgagcagcggcaagcgcacgagcaagacgatacaacacagaagacacgcgnnnnn

SEQ ID NO: 13971 - DNA, 1442 bp, Homo sapiens
cgacccacccttccgctggacccttggagggtgtaaaaaaaaaaaaaagggaggttcctgctgtcccaaaaccccttaaaaaaaaccaaaggattttcccaaacctgaaaatcaaccccctgaaaaaaaattttgcccaaaaaatgcttcaaagggcagggaggaaccttatttttaaaaaaccaaacccctatcacagggaatttaggcaaatgtccaaaactgaatttcgaatggcgaggatggcaaaaaaagctggcaacttttatgtacctgcagaagcccaaattggcgtttgtcatcaaaatcagaggtatcaatgggagtgagcccaaaggttcgaaaggtgttgcagcttcttcgcccttcgtcaaatcttcaatggaacctttgtgaagctcaacaaggcttcgattaacatgctgaggattgtagagccatatattgcatgggggtaccccaatctgaagtcagtaaatgaactaatctacaagcgtggttatggcaaaatcaataagaagcgaattgctttgacagataacgctttgattgctcgatctcttggtaaatacggcatcatctgcatggaggatttgattcatgagatctatactgttggaaaacgcttcaaagaggcaaataacttcctgtggcccttcaaattgtcttctccacgaggtggaatgaagaaaaagaccacccattttgtagaaggtggagatgctggcaacagggaggacccagatcaacaggcttattagaagaatgaactaaggtgtctaccatgattatttttctaagctggttggttaataaacagtacctgctctcaaattgaaaaaaaaaaaaaaaaaaaaaaaaaaaaaactctccgagagggcattcttatattgccgggtgtgcgcgggaaaaagagggtgtcatagaaaatatggcgcaattatgggccataaaagagctgtgtacccatggaccccaggtattttttttgtgtcaccacagggggtgacaaatattgacgcaaggagttccccccatatatagggaggaggccgcgataattataaatcttcgcgagatattagagccccccaggtgtttatacccccggtcgcgtctttataaataggactcctctcgcgcgcgaaagaaaaatgaccacccaggcgagaaagatgtgataatatacgaacgcccccggcggaccggactctatcagatcagaagagcgcacgggggagagcgagtttcatacagttatagaggagatgtacagcacgaacgagaggagtagatactctctcagagcgcggagaacatacctacgccaatgatcgagatggctagtcgagggacgagacgatataacactcggtgggagagtgttgatatcgcacacaccaacaagcagaaaaaacaacacccacgcggcgatatacacc

SEQ ID NO: 13972 - DNA, 2349 bp, Homo sapiens
cgacccacgcgtccgaatgtgctgaagggttacacgactgtgaatctaggggcatgatgtgtaagaatctaataggcacattcatccagatctttgcacatctcgacgacctgtctcgccgagcgcacgccttgctgccgccccgcagaaatgcttcggttacccacagtctttcgccagatgagaccggtgtccagggtactggctcctcatctcactcgggcttatgccaaagatgtaaaatttggtgcagatgcccgagccttaatgcttcaaggtgtagaccttttagccgatgctgtggccgttacaatggggccaaagggaagaacagtgattattgagcagagttggggaagtcccaaagtaacaaaagatggtgtgactgttgcaaagtcaattgacttaaaagataaatacaaaaacattggagctaaacttgttcaagatgttgccaataacacaaatgaagaagctggggatggcactaccactgctactgtactggcacgctctatagcccaaggaaggcttcgagaagattagcaaaggtgctaatccagtggaaatcaggagaggtgtgatgttagctgttgatgctgtaattgctgaacttaaaaagcagtctaaacctgtgaccacccctgaagaaattgcacaggttgctacgatttctgcaaacggagacaaagaaattggcaatatcatctctgatgcaatgaaaaaagttggaagaaagggtgtcatcacagtaaaggatggaaaaacactgaatgatgaattagaaattattgaaggcatgaagtttgatcgaggctatatttctccatactttattaatacatcaaaaggtcagaaatgtgaattccaggatgcctatgttctgttgagtgaaaagaaaatttctagtatccagtccattgtacctgctcttgaaattgccaatgctcaccgtaagcctttggtcataatcgctgaagatgttgatggagaagctctaagtacactcgtcttgaataggctaaaggttggtcttcaggttgtggcagtcaaggctccagggtttggtgacaatagaaagaaccagcttaaagatatggctattgctactggtggtgcagtgtttggagaagagggattgaccctgaatcttgaagacgttcagcctcatgacttaggaaaagttggagaggtcattgtgaccaaagacgatgccatgctcttaaaaggaaaaggtgacaaggctcaaattgaaaaacgtattcaagaaatcattgagcagttagatgtcacaactagtgaatatgaaaaggaaaaactgaatgaacggcttgcaaaactttcagatggagtggctgtgctgaaggttggtgggacaagtgatgttgaagtgaatgaaaagaaagacagagttacagatgcccttaatgctacaagagctgctgttgaagaaggcattgttttgggagggggttgtgccctccttcgatgcattccagccttggactcattgactccagctaatgaagatcaaaaaattggtatagaaattattaaaagaacactcaaaattccagcaatgaccattgctaagaatgcaggtgttgaaggatctttgatagttgagaaaattatgcaaagttcctcagaagttggttatgatgctatggctggagattttgtgaatatggtggaaaaaggaatcattgacccaacaaaggttgtgagaactgctttattggatgctgctggtgtggcctctctgttaactacagcagaagttgtagtcacagaaattcctaaagaagagaaggaccctggaatgggtgcaatgggtggaatggggggtggtatgggaggtggcatgttctaactcctagactagtgctttacctttattaatgaactgtgacaggaagcccaaggcagtgttcctcaccaataacttcagagaagtcagttggagaaaatgaagaaaaaggctggctgaaaatcactataaccatcagttactggtttcagttgacaaaatatataatggtttactgctgtcattgtccatgcctacagataatttattttgtatttttgaataaaaaacatttgtacattcctgatactgggtacaagagccatgtaccagtgtactgctttcaacttaaatcactgaggcatttttactactattctgttaaaatcaggattttagtgcttgccaccaccagatgagaagttaagcagcctttctgtggagagtgagaataattgtgtacaaagtagagaagtatccaattatgtgacaacctttgtgtaataaaaatttgtttaaagttaaaaaaaaaaaaaaaa

SEQ ID NO: 13973 - DNA, 1581 bp, Homo sapiens
  misc_feature 1062, 1285, 1324, 1352, 1353, 1354, 1355, 1356, 1357, 1358,1359, 1360, 1361, 1362, 1363, 1364, 1365, 1366, 1367, 1368,1369, 1370, 1371, 1372, 1373, 1374, 1375, 1376, 1377, 1378,1379, 1380, 1381, 1382, 1383, 1384, 1385, 1386, 1387: n = A,T,C or G
  misc_feature 1388, 1389, 1390, 1391, 1392, 1393, 1394, 1395, 1396, 1397,1398, 1399, 1400, 1401, 1402, 1403, 1404, 1405, 1406, 1407,1408, 1409, 1410, 1411, 1412, 1413, 1414, 1415, 1416, 1417,1418, 1419, 1420, 1421, 1422, 1423, 1424, 1425, 1426: n = A,T,C or G
  misc_feature 1427, 1428, 1429, 1430, 1431, 1432, 1433, 1434, 1435, 1436,1437, 1438, 1439, 1440, 1441, 1442, 1443, 1444, 1445, 1446,1447, 1448, 1449, 1450, 1451, 1452, 1453, 1454, 1455, 1456,1457, 1458, 1459, 1460, 1461, 1462, 1463, 1464, 1465: n = A,T,C or G
  misc_feature 1466, 1467, 1468, 1469, 1470, 1471, 1472, 1473, 1474, 1475,1476, 1477, 1478, 1479, 1480, 1481, 1482, 1483, 1484, 1485,1486, 1487, 1488, 1489, 1490, 1491, 1492, 1493, 1494, 1495,1496, 1497, 1498, 1499, 1500, 1501, 1502, 1503, 1504: n = A,T,C or G
  misc_feature 1505, 1506, 1507, 1508, 1509, 1510, 1511, 1512, 1513, 1514,1515, 1516, 1517, 1518, 1519, 1520, 1521, 1522, 1523, 1524,1525, 1526, 1527, 1528, 1529, 1530, 1531, 1532, 1533, 1534,1535, 1536, 1537, 1538, 1539, 1540, 1541, 1542, 1543: n = A,T,C or G
  misc_feature 1544, 1545, 1546, 1547, 1548, 1549, 1550, 1551, 1552, 1553,1554, 1555, 1556, 1557, 1558, 1559, 1560, 1561, 1562, 1563,1564, 1565, 1566, 1567, 1568, 1569, 1570, 1571, 1572, 1573,1574, 1575, 1576, 1577, 1578, 1579, 1580, 1581: n = A,T,C or G
ttgttcctgttccttggctttccgttgtgaaatgacaggttctgtaggagcagcacagtatttgggatcatatacttgccgcccaagcccatacacactcattcctttctgggaagcaactttgttggtacccatctgtagggaaattgtcgagttgtccaccggctgtaatgttagcttctgatcatagatgtctcttctggtacctggtgctaacatccctgcctggctggctcctttattagtgcccatctgcagactaattgtggtctggtcaaaaggtttgtcagtttgcattttgggatcataaagatgcctcctagtcccgtaagctgtcatacctgcctggctggcacatttgttggttcccatctgcagaccaattacactttggccagcttttaattttccttcatcaaaacgtcttgtttgtttttctgcatacttaactccaatgtcaatggttgtatggaatccttttgttttagccagacctgctagagccaccagagtagtctgaacctgggtcatgtttccattctcaaaaagatcatttgcttcgaatatgtcatgtggcttcataccataagcctgaatagctttaataaagttgccaatattctccaactgaggccagttcagtgaggactcgttgaccttccttcactgagcctggctgtagcttgtttataagttcgcagaggatgatgccatcctttaagcccagctgccccccccccccccccccccccccgaagctccatttttgcctgttgcccacttttggaagcatcttgttctcgacttcggtcgagagttcataggaagggcccttgttgaagtgggtcatggtggttcgggcggcgggaagagacagcgctggggtccggggtctctcgcacttcgcttccccgctcctggccccgaggagtggccgccgcgggggatgctcgaactccctcctctgggaggcgcaggagaagatctccgcaattggatagaagaggtgacaggcatgagcattggccccaacttccagctgggcttaaaggatggcatcancctctgcgaacttataaacaagctacagccaggctcagtgaagaaggtcaacgagtcctcactgaactggcctcagttggagaatattggcaactttattaaagctattccaggcttatggtattgaagccacatgacatattcgaagcaaatgatcttttgggagaattggaaacatgacccaggttcaagactactctggtggctctagcagggtcttggnttaaaacaaaaggattccatacaacccattgacattggngtagaattcagtggctacgtgatgaaannnnnnnnnnnnnnnnnnnnnnnnnnnnnnnnnnnnnnnnnnnnnnnnnnnnnnnnnnnnnnnnnnnnnnnnnnnnnnnnnnnnnnnnnnnnnnnnnnnnnnnnnnnnnnnnnnnnnnnnnnnnnnnnnnnnnnnnnnnnnnnnnnnnnnnnnnnnnnnnnnnnnnnnnnnnnnnnnnnnnnnnnnnnnnnnnnnnnnnnnnnnnnnnnnnnnnnnnnnnnnnnnnnnnn

SEQ ID NO: 13974 - DNA, 1001 bp, Homo sapiens
cgtccggcggagcgtccgaatgcttgagccctcagtctgggcaatatactgagaccccatctctgcaaaaaaagaagttccagaggcccagacttgctactggtgcccagggggctgtggggcagcttgggcattgagccctcatgctgtgggatctgatgctgtctctaggtagatagtgttggaattgaattggaggacacccaactggtgtccgctgcagaactgattgcttgcctggtggtggggagaaatccttacatattttttggagtcacagaagtcttctgtgttgattgttgtagtgtgaaagcagaggaaaaacaatggtttgggttttttcaaaacaactttcatgacacatacgagaatgtaaattccagaagggccaaggccatgtctgttttacctactctttttcccccagcttctagtacataggaggcatttgatatataccaaacaaacaagcaagtgactgactagttgatgtcctgagaatcttcttgctgctggaagggtcctcctgccctcagcatttctctctgggaagctcttagactactctctcagtcatgcccaccttttcggtcataggtcagaagccaatgacctggccctgaggctggctcgccactacacgggacaccaggacgtggtggtattagatcatgcgtatcacggccacctgagctccctgattgacatcagtccctacaagttccgcaacctggatggccagaaggagtgggtccacgtggcacctctcccagacacctaccggggcccctaccgggaggaccaccccaacccagctatggcctatgccaacgaggtgaaacgtgtggtcagcagtgcacaggagaagggcaggaagattgcagccttcttcgctgagtctctgcccagtgtgggagggcagatcattccccctgctggctacttctcccaagtggcagagcacatccgcaaggccggaggggtctttgttgcagatgaga

SEQ ID NO: 13975 - DNA, 3258 bp, Homo sapiens
  misc_feature 3247, 3248, 3249, 3250, 3251, 3252, 3253, 3254, 3255, 3256,3257, 3258: n = A,T,C or G
ccgcgtccggcagccaggctgcgcggcgcgccccggctcccgcccgctcccagccgggcgacccacgcgtccgcggacgcgtggggacggctcccggctgcagtctgcccgcccgccccgcgcgggggccgagtcgcgaagcgcgcctgcgacccggcgtccgggcgcgctggagaggacgcgaggagccatgaggcgccagcctgcgaaggtggcggcgctgctgctcgggctgctcttggagtgcacagaagccaaaaagcattgctggtatttcgaaggactctatccaacctattatatatgccgctcctacgaggactgctgtggctccaggtgctgtgtgcgggccctctccatacagaggctgtggtacttctggttccttctgatgatgggcgtgcttttctgctgcggagccggcttcttcatccggaggcgcatgtaccccccgccgctgatcgaggagccagccttcaatgtgtcctacaccaggcagcccccaaatcccggcccaggagcccagcagccggggccgccctattacaccgacccaggaggaccggggatgaaccctgtcgggaattccatggcaatggctttccaggtcccacccaactcaccccaggggagtgtggcctgcccgccccctccagcctactgcaacacgcctccgcccccgtacgaacaggtagtgaaggccaagtagtggggtgcccacgtgcaagaggagagacaggagagggcctttccctggcctttctgtcttcgttgatgttcacttccaggaacggtctcgtgggctgctaagggcagttcctctgatatcctcacagcaagcacagctctctttcaggctttccatggagtacaatatatgaactcacactttgtctcctctgttgcttctgtttctgacgcagtctgtgctctcacatggtagtgtggtgacagtccccgagggctgacgtccttacggtggcgtgaccagatctacaggagagagactgagaggaagaaggcagtgctggaggtgcaggtggcatgtagaggggccaggccgagcatcccaggcaagcatccttctgcccgggtattaataggaagccccatgccgggcggctcagccgatgaagcagcagccgactgagctgagcccagcaggtcatctgctccagcctgtcctctcgtcagccttcctcttccagaagctgttggagagacattcaggagagagcaagccccttgtcatgtttctgtctctgttcatatcctaaagatagacttctcctgcaccgccagggaagggtagcacgtgcagctctcaccgcaggatggggcctagaatcaggcttgccttggaggcctgacagtgatctgacatccactaagcaaatttatttaaattcatgggaaatcacttcctgccccaaactgagacattgcattttgtgagctcttggtctgatttggagaaaggactgttacccatttttttggtgtgtttatggaagtgcatgtagagcgtcctgccctttgaaatcagactgggtgtgtgtcttccctggacatcactgcctctccagggcattctcaggcccgggggtctccttccctcaggcagctccagtggtgggttctgaagggtgctttcaaaacggggcacatctggctgggaagtcacatggactcttccagggagagagaccagctgaggcgtctctctctgaggttgtgttgggtctaagcgggtgtgtgctgggctccaaggaggaggagcttgctgggaaaagacaggagaagtactgactcaactgcactgaccatgttgtcataattagaataaagaagaagtggtcggaaatgcacattcctggataggaatcacagctcaccccaggatctcacaggtagtctcctgagtagttgacggctagcggggagctagttccgccgcatagttatagtgttgatgtgtgaacgctgacctgtcctgtgtgctaagagctatgcagcttagctgaggcgcctagattactagatgtgctgtatcacggggaatgaggtgggggtgcttattttttaatgaactaatcagagcctcttgagaaattgttactcattgaactggagcatcaagacatctcatggaagtggatacggagtgatttggtgtccatgcttttcactctgaggacatttaatcggagaacctcctggggaattttgtgggagacacttgggaacaaaacagacaccctgggaatgcagttgcaagcacagatgctgccaccagtgtctctgaccaccctggtgtgactgctgactgccagcgtggtacctcccatgctgcaggcctccatctaaatgagacaacaaagcacaatgttcactgtttacaaccaagacaactgcgtgggtccaaacactcctcttcctccaggtcatttgttttgcatttttaatgtctttattttttgtaatgaaaaagcacactaagctgcccctggaatcgggtgcagctgaataggcacccaaaagtccgtgactaaatttcgtttgtctttttgatagcaaattatgttaagagacagtgatggctagggctcaacaattttgtattcccatgtttgtgtgagacagagtttgttttcccttgaacttggttagaattgtgctactgtgaacgctgatcctgcatatggaagtcccacttcggtgacatttcctggccattcttgtttccattgtgtggatggtgggttgtgcccacttcctggagtgagacagctcctggtgtgtagaattcccggagcgtccgtggttcagagtaaacttgaagcagatctgtgcatgcttttcctctgcaacaattggctcgtttctcttttttgttctcttttgataggatcctgtttcctatgtgtgcaaaataaaaataaatttgggcaaaaaaaaaaaaaaaaaaaaaaaaaaaaaaaaaaaaaaaaaaaaaaaaaaaaaaaaaaaacgggggggccaaaattaggcggttacccggtttttgtgagcaaggggggccctaaagggagcggatataaaaagcaggagcaggggggtgtaaacaaggtgggcgggcgaaatggctgtggcatttctgggaagggactcattgtggggtgcgccttctggcgcatactcaggaataagtcggggcaattaaactttagggtttgggtcacactgttgtctgtggtgaaattggcannnnnnnnnnnn

SEQ ID NO: 13976 - DNA, 3217 bp, Homo sapiens
acaggagtttttagagacttaatttatgtataaacaatttaaacactttgccataaattatctttgcctgtccctagtctttgcttagcagcaaattaaaattaatataaaaactcgatgaacaattcatacatgtatattacaaaaaagttcctgtaccaaagttcttattagactttatttttgtttttttaatttttaaaattttttttgtttttatttttattttttaaattttctctcctcgtggtgactgtcatgtgattgtctcagtttctggaccaaacaaacacactaataattttaaatctgaaacagtgattgtgcctttcggctcatgtatgtacagggtgatcagaagtggtacctgttagcaaaagtgtcacgatgctgcacctctaccgaaactgatacccacgaactacggaatctaaacagactacaccctgtaactgcgtattactgtccacaatggaatctccaaagacaaaagagtatgaaatttatctgtagtgattatagccaccattttgaattaaattttacactctgcgctcaaataaattagctcaggccagacttagttgggacctgagagttaagtgctggatggtattatttcactttgatttttgataggaatttcttttattccctcatgtttttttttctttaaaaagtatttccagtgctcactcctcctcttttatcccccctccccaggcgctacacacaaatcacccccaaagtcgtgttttaaatgcacctgtatttgcttaaacgaaaatgtcagaagtatttgtcctacaagcagtctgagtggtttgtcccgcagctggtctggtgacgctggcccccgcggatgtctgcgtgttgctcacatgtgaatgagtgaggtaattggatatgaggccttctttcttatcttcgcttctttgtttatcggtccgtgtgtttgttttgttttgtttttgtttgttttcttctttgcttattcgtttttgttcttttgttccttttggacactttgcgtctcttttctgcgtagacccagaacaagtgggtcatattttaggggaacttggaacattgtgtgtgtctgttcattcattcgtttgttttgttttcctcggaattttcagccgggctttagtctacttcaggatgagggacttctcgcttggacagtagcatttgaactcaaaaaatgtgagctttcttgccacttggtctcctaaagcagcccagccgcagtgcccctgttaggtcttcatctccttaggagaggagataacagttactcctgctgagccattcagacaaggaatggcagcagattattttgttacctctttcccatctcattctgtcttaaaaactggatgttgctgctactgtctgcaagctctgggtattgctccacgggaagcacgtaatatccctcgtacccttgcacgcgcccggtgctcagaagctgctgcttctcgccctcagtccacaggcggctcccctctctcccgtccctggctttctgctgctccttggcccaggccgtgcccagggccctctgtctcgcctggtccaggacgcgggccttctcttcgtccagggtgtcgggggtgaggccatagcggatgctgagcagcagcgtggagtactggaactcaatgttcgtgaaccttcgagtcctgccgttgaccagcagcgtgggctgggacacggtcacgttcaccccgctctctagcaccttgcggccgatggtggtgcctagtgtgaccaggtcgccatcggctgagccaatcttcacaaagtagtgggtgtccttgccctcgatgctgtagtgcatcttgtccaggtagtaggcgttgttcagcacagatgccaccttgcggctatcttcgctggcgatgctggacacgcccgtggtcacccgcccttctttgatggcaaacatgatgcctttgccaatgatgggcgtggtggtggcaaaccagtgacctgctttctctcggatgctggcgtggagctttttagtaatgacctgtccttccagagccatgaaggcctggttatgtctctctgttgtctgttggacacctgtaatgagctgtccattctcacttgcttgactctctgacaattcatagggaggaggcacgaaatacattttggctctcgggaagccaggaatgatgttgctaagctgaaatccaaacatcacaagccagcttttcacatctgtcacgtagttcttcaaatctagctcactgctgagaggattgttgctcttgaacatatacaggttaaagggggtcggctccttgcccacgtttttccacatggtatagtctggggaggtccatcgtcctgccagcacatcataatcacgctgagtgaagtggaccagcttggtcagggggtcatagagtcccccatggaagccaatgaccatctggaagtcggggttggagtcataataaatctccccataggccgtgtactgcagctgtttgatcatgaggccgttgatgctgaacacagccagaggagtccctgtgttatcagaggcaacatagtactcctccccactgctgctctccatggcaaagaggtggccctggaggtcgtagtacagtgaggtaatctccgagttggagtgattgtagacatgggtgatgcgcgtcgggttgtggaggtcagagtagaagtactgcaggtggtggcccaggttggtcttgtaggaagcccgccgtcctacgccatcatagcggtactggacactccacccgctggccttgttgtaggctcttgttaggaggcccttggaattgtattcgaagatgtcagaccctctctggcacagatagccatcgtcgtcaattttgtactgcacatccccgagtctggttatccgatcccggaggtcatagcgcaagggcatgaggcgcacactgttgcctgggttcagtaagtggagattcccattaaggtcatagctgtagcgccaggtcgggcggtcattgacggccacgctctggagctgcccgtccccatcgtagtcataggtgtacttcgtggtattggcatagggccccagttttagctccctcttgatcaccctgcccatgctgtcatattgcaccgtcatccagtacatgagggaccggaacatctcatactggaccccctgatccgcccaggggtcgaaggtttgtga

SEQ ID NO: 13977 - DNA, 661 bp, Homo sapiens
  misc_feature 1, 661: n = A,T,C or G
ncacgcgtccggcttggcaatgcagctctagcttctaatgcccttttttaaccctttaggtatctgatcgctttgccaattttgcgttactgggcaggctaagagatcttcttttaattcagcctgcttaagacgggaactgataactgtagtgtatcctctgccttttttcttatctattggaggaagctcagatggtgtcacaagaaggatctgaagtggagcttctagtatccccaggagcgcgaagtgaacacggaaggtacctgcaggatccaattgtgtccattgatctctcagagtggctgaggataatagagtttcttcttcaaggtctcaaggtctgaagcatcccacagaatgatcctactgaataactcccataagctgctggccctatacaaatccttggccaggagcatccctgagtccctgaaggtgtatggctctgtgtatcacatcaatcacgggaaccccttcaacatggaggtgctggtggattcctggcctgaatatcagatggttattatccggcctcaaaagcaggagatgactgatgacatggattcatacacaaacgtatatcgtatgttctccaaagagcctcaaaaatcagaagaagttttgaaaaattgtgagatcgtaaactggaaacagagan

SEQ ID NO: 13978 - DNA, 2304 bp, Homo sapiens
tcgacccacgcgtccggtggccgccgtcagagccgccatcttgtgggagcaaaaccaacgcctggctcggagcagcagcctctgaggtgtccctggccagtgtccttccacctgtccacaagcatggggaacatcttcgccaacctcttcaagggcctttttggcaaaaaaagaaatgcgcatcctcatggtgggcctggatgctgcagggaagaccacgatcctctacaagcttaagctgggtgagatcgtgaccaccattcccaccataggcttcaacgtggaaaccgtggagtacaagaacatcagcttcactgtgtgggacgtgggtggccaggacaagatccggcccctgtggcgccactacttccagaacacacaaggcctgatcttcgtggtggacagcaatgacagagagcgtgtgaacgaggcccgtgaggagctcatgaggatgctggccgaggacgagctccgggatgctgtcctcctggtgttcgccaacaagcaggacctccccaacgccatgaatgcggccgagatcacagacaagctggggctgcactcactacgccacaggaactggtacattcaggccacctgcgccaccagcggcgacgggctctatgaaggactggactggctgtccaatcagctccggaaccagaagtgaacgcgacccccctccctctcactcctcttgccctctgctttactctcatgtggcaaacgtgcggctcgtggtgtgagtgccagaagctggcctccgtggtttggtcaccgtgtgcatcgcaccgtgctgtaaatgtggcagacgcagcctgcggccaggctttttatttaatgtaaatagtttttgtttccaatgaggcagtttctggtactcctatgcaatattactcagctttttttattgtacacaagacaaatcaactcactgttcagtgctgagcaggggatgtaggcccatgagggcaccttggcctccaggcagtcgctgtgttcgggagagccggccacgcccttggctttagagcctgtgttgaaatccattttggtggttgggtttttaacccaaactcagtgcattttttaaaatagttaagaatccaagtcgagaacacttgaacacacagaagggagacccgcgcctagcatagatttgcagttacggcctggatgcccaggtcgccagcccagctgttcccctcgggaacatgaggtggtggtggcgcagcagactgcgatcaattctgcatggtcacagtagagatccccgcaactcgcttgtccttgggtcaccctgcattccatagccatgtgcttgtccctgtgctcccacggttcccaggggccaggctgggagcccacagccaccccactatgccgcaggccgccctacccaccttcaggcagcctatgggacgcagggccccatctgtccctcggtcgccgtgtggccagagtgggtccgtcgtccccaacactcgtgctcgctcagacactttggcaggatgtctggggcctcaccagcaggagcgcgtgcaagccgggcaggcggtccacctagacccacagcccctcgggagcaccccacctctgtgtgtgatgtagctttctctccctcagcctgcaagggtccgatttgccatcgaaaaagacaacctctacttttttcttttgtattttgataaacactgaagctggagctgttaaatttatcttggggaaacctcagaactggtctatttggtgtcgtggaacctcttactgctttcaatacacgattagtaatcaactgttttgtatacttgttttcagttttcatttcgacaaacaagcactgtaattatagctattagaataaaatctcttaactatttcaaaaaaaaaaaaaaaaaaaaaaaaaaaaaaaaaaaaaaaaaaaaaaaaaaaaaaaaaaaaaaaaaaaaaaaaaaaaaaaaaaaaaaaaaaaaaagggaaaaaaaaaaaagggggggcccccccgggggggggccccaaatcgccccaaagggggggggaataacccgccccaagggggggggggtaaaaaccggggggaggggaaaaaccggggggtacccaaattaaatcccttggaaaaaaaccccttttggaaaggggggggaaaaaaaaaaggggcccaaccaaaggcccctccaaaagggggggcaacctggagggggaaaggaaattggaaaccttaaatttttgggaaaaaaccgggtaaaatttgggaaaaaaagccccttttttaacccaaagggccaaaaggggaaaaacccc

SEQ ID NO: 13979 - DNA, 5555 bp, Homo sapiens
  misc_feature 1: n = A,T,C or G
nacggctgcgagaagacgacagaaggggagaaggtagcagacagacagacggatctaacctctcttggatcctccagccatgaggctgctctgggggctgatctgggcatccagcttcttcaccttatctctgcagaagcccaggttgctcttgttctctccttctgtggttcatctgggggtccccctatcggtgggggtgcagctccaggatgtgccccgaggacaggtagtgaaaggatcagtgttcctgagaaacccatctcgtaataatgtcccctgctccccaaaggtggacttcacccttagctcagaaagagacttcgcactcctcagtctccaggtgcccttgaaagatgcgaagagctgtggcctccatcaactcctcagaggccctgaggtccagctggtggcccattcgccatggctaaaggactctctgtccagaacgacaaacatccagggtatcaacctgctcttctcctctcgccgggggcacctctttttgcagacggaccagcccatttacaaccctggccagcgggttcggtaccgggtctttgctctggatcagaagatgcgcccgagcactgacaccatcacagtcatggtggagaactctcacggcctccgcgtgcggaagaaggaggtgtacatgccctcgtccatcttccaggatgactttgtgatcccagacatctcagagccagggacctggaagatctcagcccgattctcagatggcctggaatccaacagcagcacccagtttgaggtgaagaaatatgtccttcccaactttgaggtgaagatcacccctggaaagccctacatcctgacggtgccaggccatcttgatgaaatgcagttagacatccaggccaggtacatctatgggaagccagtgcagggggtggcatatgtgcgctttgggctcctagatgaggatggtaagaagactttctttcgggggctggagagtcagaccaagctggtgaatggacagagccacatttccctctcaaaggcagagttccaggacgccctggagaagctgaatatgggcattactgacctccaggggctgcgcctctacgttgctgcagccatcattgagtctccaggtggggagatggaggaggcagagctcacatcctggtattttgtgtcatctcccttctccttggatcttagcaagaccaagcgacaccttgtgcctggggcccccttcctgctgcaggccttggtccgtgagatgtcaggctccccagcttctggcattcctgtcaaagtttctgccacggtgtcttctcctgggtctgttcctgaagtccaggacattcagcaaaacacagacgggagcggccaagtcagcattccaataattatccctcagaccatctcagagctgcagctctcagtatctgcaggctccccacatccagcgatagccaggctcactgtggcagccccaccttcaggaggccccgggtttctgtctattgagcggccggattctcgacctcctcgtgttggggacactctgaacctgaacttgcgagccgtgggcagtggggccaccttttctcattactactacatgatcctatcccgagggcagatcgtgttcatgaatcgagagcccaagaggaccctgacctcggtctcggtgtttgtggaccatcacctggcaccctccttctactttgtggccttctactaccatggagaccacccagtggccaactccctgcgagtggatgtccaggctggggcctgcgagggcaagctggagctcagcgtggacggtgccaagcagtaccggaacggggagtccgtgaagctccacttagaaaccgactccctagccctggtggcgctgggagccttggacacagctctgtatgctgcaggcagcaagtcccacaagcccctcaacatgggcaaggtctttgaagctatgaacagctatgacctcggctgtggtcctgggggtggggacagtgcccttcaggtgttccaggcagcgggcctggccttttctgatggagaccagtggaccttatccagaaagagactaagctgtcccaaggagaagacaacccggaaaaagagaaacgtgaacttccaaaaggcgattaatgagaaattgggtcagtatgcttccccgacagccaagcgctgctgccaggatggggtgacacgtctgcccatgatgcgttcctgcgagcagcgggcagcccgcgtgcagcagccggactgccgggagcccttcctgtcctgctgccaatttgctgagagtctgcgcaagaagagcagggacaagggccaggcgggcctccaacgagccctggagatcctgcaggaggaggacctgattgatgaggatgacattcccgtgcgcagcttcttcccagagaactggctctggagagtggaaacagtggaccgctttcaaatattgacactgtggctccccgactctctgaccacgtgggagatccatggcctgagcctgtccaaaaccaaaggcctatgtgtggccaccccagtccagctccgggtgttccgcgagttccacctgcacctccgcctgcccatgtctgtccgccgctttgagcagctggagctgcggcctgtcctctataactacctggataaaaacctgactgtgagcgtccacgtgtccccagtggaggggctgtgcctggctgggggcggagggctggcccagcaggtgctggtgcctgcgggctctgcccggcctgttgccttctctgtggtgcccacggcagccgccgctgtgtctctgaaggtggtggctcgagggtccttcgaattccctgtgggagatgcggtgtccaaggttctgcagattgagaaggaaggggccatccatagagaggagctggtctatgaactcaaccccttggaccaccgaggccggaccttggaaatacctggcaactctgatcccaatatgatccctgatggggactttaacagctacgtcagggttacagcctcagatccattggacactttaggctctgagggggccttgtcaccaggaggcgtggcctccctcttgaggcttcctcgaggctgtggggagcaaaccatgatctacttggctccgacactggctgcttcccgctacctggacaagacagagcagtggagcacactgcctcccgagaccaaggaccacgccgtggatctgatccagaaaggctacatgcggatccagcagtttcggaaggcggatggttcctatgcggcttggttgtcacggggcagcagcacctggctcacagcctttgtgttgaaggtcctgagtttggcccaggagcaggtaggaggctcgcctgagaaactgcaggagacatctaactggcttctgtcccagcagcaggctgacggctcgttccaggacctctctccagtgatacataggagcatgcaggggggtttggtgggcaatgatgagactgtggcactcacagcctttgtgaccatcgcccttcatcatgggctggccgtcttccaggatgagggtgcagagccattgaagcagagagtggaagcctccatctcaaaggcaagctcatttttgggggagaaagcaagtgctgggctcctgggtgcccacgcagctgccatcacggcctatgccctgacactgaccaaggcccctgcggacctgcggggtgttgcccacaacaacctcatggcaatggcccaggagactggagataacctgtactggggctcagtcactggttctcagagcaatgccgtgtcgcccaccccggctcctcgcaacccatccgaccccatgccccaggccccagccctgtggattgaaaccacagcctacgccctgctgcacctcctgcttcacgagggcaaagcagagatggcagaccaggctgcggcctggctcacccgtcagggcagcttccaagggggattccgcagtacccaagacacggtgattgccctggatgccctgtctgcctactggattgcctcccacaccactgaggagaggggtctcaatgtgactctcagctccacaggccggaatgggttcaagtcccacgcgctgcagctgaacaaccgccagattcgcggcctggaggaggagctgcagttttccttgggcagcaagatcaatgtgaaggtgggaggaaacagcaaaggaaccctgaaggtccttcgtacctacaatgtcctggacatgaagaacacgacctgccaggacctacagatagaagtgacagtcaaaggccacgtcgagtacacgatggaagcaaacgaggactatgaggactatgagtacgatgagcttccagccaaggatgacccagatgcccctctgcagcccgtgacacccctgcagctgtttgagggtcggaggaaccgccgcaggagggaggcgcccaaggtggtggaggagcaggagtccagggtgcactacaccgtgtgcatctggcggaacggcaaggtggggctgtctggcatggccatcgcggacgtcaccctcctgagtggattccacgccctgcgtgctgacctggagaagctgacctccctctctgaccgttacgtgagtcactttgagaccgaggggccccacgtcctgctgtattttgactcggtccccacctcccgggagtgcgtgggctttgaggctgtgcaggaagtgccggtggggctggtgcagccggccagcgcaaccctgtacgactactacaaccccgagcgcagatgttctgtgttttacggggcaccaagtaagagcagactcttggccaccttgtgttctgctgaagtctgccagtgtgctgaggggaagtgccctcgccagcgtcgcgccctggagcggggtctgcaggacgaggatggctacaggatgaagtttgcctgctactacccccgtgtggagtacggcttccaggttaaggttctccgagaagacagcagagctgctttccgcctctttgagaccaagatcacccaagtcctgcacttcaccaaggatgtcaaggccgctgctaatcagatgcgcaacttcctggttcgagcctcctgccgccttcgcttggaacctgggaaagaatatttgatcatgggtctggatggggccacctatgacctcgagggacacccccagtacctgctggactcgaatagctggatcgaggagatgccctctgaacgcctgtgccggagcacccgccagcgggcagcctgtgcccagctcaacgacttcctccaggagtatggcactcaggggtgccaggtgtgagggctgccctcccacctccgctgggaggaacctgaacctgggaaccatgaagctggaagcactgctgtgtccgctttcatgaacacagcctgggaccagggcatattaaaggcttttggcagcaaagtgtcagagaaaaaaaaaaaaaaaaaaaaaaggggggggaaaaaaacccggggccaagtcggccccgttttggcaagggcaaaaaaaaaggggggggcgttaaacttttttaaaa

SEQ ID NO: 13980 - DNA, 1575 bp, Homo sapiens
  misc_feature 1573, 1574, 1575: n = A,T,C or G
aaagtggggattacaggtgtgagccactgtgcccagccctttctcactgacttataagagtactctctgtgtgctgcttctgcttgctggttacccgcccactcctctgtctttgccactctgtatctatactcagactgaggtgctgggatggcgagcaggggaccccacagcactgtccccagggaattcaagtcctgtgaccgccagtgacttactccgtttccttggggcttttcccacctcaacctgtattgtttctttttcataaataaattcagcattatagtatcattaaaagaagccttaaagaggcgtatttttccttttggttgaaggaagggaatagttaataatagttttcacctcttctcccaaaaagtacagtccaaatttgtgcacagagattgctgtggtattcaagaggtacttgcattttagctccttaattccctggccagtgttagctgtttagtgccccctcacccatcccatttaggcacatcccaatagacagagccaggctgagttacagggggagagtgtcatctctggccccgattaagatggccttgtcacagtgaccgctgagtaggcatggatgagtgggatatttagctgaggaaccctttcccttttccttctttttggggtctcttcttacagtgaacttccaaaatgtcaaatctagggctgtttcccaaattacactattctaggcatcattttgattcccatgtcactccttaactcacttccttgagcactacatgtatgttgtcagccacgagacaggacttcctaaatagtgtgtgcaccagcctaactctgccttacccagaaaccaaccacctaagaggaaaactcagaagatattaatgaaaactaattgaaagtacgcacacttctcatgtaggaacaaaattaaaattttacatttttattttacaaaattaaaaaattacattttgtaggaacaaaatgtaaattttgtaaatacaaaattctttttaaagtcctgtttaaagaacagtagaactaagtgaaaatattcagaacgagctccttagaagaaaggaataagaactttttactggaactattttccatctctagaaaaagtgcttcttcccctccccctccctctccatggtacgtttttgtgaaaatgcttttctgtcaggtttaaacaaacagtttgacatagctcgttgacaagaacatattgtaaaacaaatctaattaaagagtaatatgtggtctatttgtgttcctgttgtaataatttgataagtaaacttctgagggcaaaattactgtttaatattactcttaaaatgttgcatgtttggcgtcattcctaagagccatgtaattttaaacttttaattgcagttagtgaatatgaaaggatttctgaataaaaatctatccacattaaaaaaaataaaaattgggccgccgaaatttaacctgggcgccggagaagctgccgcagacggcgagggttccaagcggcggcgacagtcggtgtcgcgaccagccgccaaaccaccctcaccgcacttcttannn

SEQ ID NO: 13981 - DNA, 3994 bp, Homo sapiens
  misc_feature 3994: n = A,T,C or G
acgcggggaggcagccggccagggaagcacggtccaggcggctacattcggcccggccatggcagcggcgcccctgaaagtgtgcatcgtgggctcggggaactggggttcagctgttgcaaaaataattggtaataatgtcaagaaacttcagaaatttgcctccacagtcaagatgtgggtctttgaagaaacagtgaatggcagaaaactgacagacatcataaataatgaccatgaaaatgtaaaatatcttcctggacacaagctgccagaaaatgtggttgccatgtcaaatcttagcgaggctgtgcaggatgcagacctgctggtgtttgtcattccccaccagttcattcacagaatctgtgatgagatcactgggagagtgcccaagaaagcgctgggaatcaccctcatcaagggcatagacgagggccccgaggggctgaagctcatttctgacatcatccgtgagaagatgggtattgacatcagtgtgctgatgggagccaacattgccaatgaggtggctgcagagaagttctgtgagaccaccatcggcagcaaagtaatggagaacggccttctcttcaaagaacttctgcagactccaaattttcgaattaccgtggttgatgatgcagacactgttgaactctgtggtgcgcttaagaacatcgtagctgtgggagctgggttctgcgacggcctccgctgtggagacaacaccaaagcggccgtcatccgcctgggactcatggaaatgattgcttttgccaggatcttctgcaaaggccaagtgtctacagccaccttcctagagagctgcggggtggccgacctgatcaccacctgttacggagggcggaaccgcagggtggccgaggccttcgccagaactgggaagaccattgaagagttggagaaggagatgctgaatgggcaaaagctccaaggaccgcagacttctgctgaagtgtaccgcatcctcaaacagaagggactactggacaagtttccattgtttactgcagtgtatcagatctgctacgaaagcagaccagttcaagagatgttgtcttgtcttcagagccatccagagcatacataaagtgaatcatgcaacgtgttgggggaagttctgcctttctgatcaatcttttgggttcacgtggaaaccaggacttggcaacatgatgtttgactgtaatctcatcacggatatgtatgaatttttacaggttcgtttttgaattgtgagaggcagttcattagcaaagatgtactgggcagtaactaaacacacatgcaaacatgtgaatggtggtttattcctcattctgtggatgtttctatgagccaaaatttgatgtctttttttcaaaattgcttatgaaatttccacacaatcgtagcttataagattggaacgatctcagccaaatattttaggtgtaattcatatgtatttgagtggaggattttttttctcatttttctagtgttaaattttaaccagcattaacatggtagagtggaggagtgagtgtgttcaaagatcaacatatttaacttttaaacactatctcaaagccagcataattaactactttgattgtgggctgacctttgtttttttaacaatcaggcatttttaattagataatccactcatgtatttccccctcactgcagttgtctgcatttttagcctcttttctcttcgttagttgtcagaatatgccttcgtcaaggctcagaggtaacaagacagaaaattcatctgggattttcctgctgtggctggcacattcttctgattaacagacacttgtatgatgctttaggctagttagtgcattttttagcaaacatttatcttaaacatcacagatccactggggggtgcaaggggctactgttagtcctcttgttagatgcagtcactcctcctggtcacctagtgagcagggacagagccaggagtcaagtgcagtgccaaggtgcatgaccctctgagaagtcactgggctgatttgacctccgactcattggttgtgcaaatgccatgtgcagcctttcctgaggccataggagggcttcctgcagctgagatctatgcaggccatcctctcaacaggtgccactccaagggcggtcctcggtgcagcagcatcagcttcacttgtgggggggtgggggaaggggcggtctcagaaatgcaggttcccaggtcccaccctggacttctgaaggggtgtggcatctgtgtttctgatgcttactacaatatgtgaaccactactttagaaaatctgctttaacttggtattcctctaattgtgttccctaggaaatgactgtcccaagagccagtgattattccaggtgttccctggaaaggtcaagtgagtctgggaaacactatgtctgtacacctcttgaaggtgtcgaatgtatgtttatacatcagtggaacccatttttctagcctagcaagtcccaaacacattacactgaagagattttggtgaggaaacttgctggagttttcagggaacactgttctaggcttaggtgaccttaggatcactcaagtagacccttcactccctgcgagaaattaggatgaataactacctgtggcattgttggttctgaacttttacagttcaggcctgctgtgaatctttgatgaagctttaaggtgacactgttgtacaagatgtcagctttgctgaaacgcacattacctggaataagtgctttaattgtagaattagaatgggatttactgtactgttttaaatgagattggcttcagaatccattacagttaccttacatagcacttgatacgtgttaaatgaacatatgaatgtaatttatatattcctagaatttaagttactttgtgagatttgggcctgtccctcaatgccagtttaggatttctttttttctataccttgaaatgattataaaatagattttcatgggaattttaaaaactctatccaaaacatttttggagcattttaaagccccatacacagaagtatacgaaagcacacaaaacactccaagtttcagcagttttagcgccaccattaacccactttgcttgtctcatgaaaaatctttgttaaagtttgtacacaggtaacaaaaagttactttaaaagatatataaagggctgtaagctaattgtggtgtctagtaagtagcataatgagatgtgaggagttggaactttgcgtgttttgcgtattttcatctgcattcagcttcttactctgggtttgtactcgagtgttatttctttacaaatgcccttgtaattaccactctgaagtctgctgactgtgtctcttgaacatacttaggatattctgcacattatggaaaaaggtaaattttagaagtttctgctctactaactgtagatatttatgactctgcgagttatctatttttataaccacctgtggtccattgttcattttaattcacatttcttatgaagtatggtaacagggagggagacacctagattagcagctcaatttgtactacttcagccaatctgtgaatgtaaaaactacactgttgccttgctaggatccaccctcctataatatggaacaaatatctgaatgaaatccaccctaggagacggagtcaaactaaacttgtggtttttcatttaacttttgactacagcatggccccatggcatccacaccaagagggtgttgtgatgaggtgccggtgtgcaaagggaactttagtttttccactggttcttatctgctagcctttctttaacataccattgtgacaaaattgcggcaacagaacggctcggggacgattatacgaaacaagcgcgctctcttacaacattttagcccccataaaaaaaagactaccaaaacaacaacaaacagagcctcgccatatagcatatccggagacatcaaaacacan

SEQ ID NO: 13982 - DNA, 2170 bp, Homo sapiens
tcgacccacgcgtccgggtgcttccatcacatatcccaaggttatatgtatacatacttataaagaagattaaaaggaatacactgttaacattgataatgggccgtatgaataaagagacccaagaacccctattagtgcattaatgaatataatatatttagagtatacccacccccagctcctctaagtcaccctcaaattcccctcccatctgcatgtctccccctcccctacctcttcctctttcttcttactgtgactaaattaatcctggcctcatgtccctgggcattagacaccatctaccagaccatggacaattgatcatgaccaatacccccatcatcgccagctgcacactcctggggctctacctctttttcaaaatattctcccaggagtacatcaacctcttgctgtccatgtatttcttcgtgctggggatcctggccctgtcacacaccatcagccccttcatgaataagttttttccagccaacttcccaaaccgccagtatcagctgctcttcacacagggctctggggaaaacaaagaagagatcatcaactatgagtttgacactaaggacctggtgtgcctgggcctaagcagcgtcgttggtgtctggtaccttctgaggaagcactggattgccaacaacctgtttggcctggccttctcccttaatggggtagagctcctgcacctgaacaacgtgagcactggctgtatcctgctcggaggactcttcatctatgacatcttctgggtattcggcaccaacgtgatggtgacagtggccaagtcctttgaggcaccaataaaattggtgttcccccaggatctgctggagaagggccttgaagcagacaactttgccatgctgggacttggagacattgtcattccagggatcttcattgccttactgcttcgttttgacatcagcttgaagaagaacacgcacacctacttctacaccagcttcgccgcctacatcttcggcctgggtctcaccatcttcatcatgcacatcttcaagcacgcccagccggctctcctgtacctggtccctgcctgcatcggctttcctgtcctggtggcactagccaagggagaagtggccgagatgttcagttatgaggagtccaaccctaaagatccagcagccgagactgaatccaaagaggagtcaacagaggcgtcggcatcgaagaggctagagaagaaggagaaatgaggcagcgctgcctgacccttgagggccagatcggacaggcaggggatgacctgtgggcgacacagaagagaagacacctgcaggaggcgacggtggccccaggatggggagcaggcctctgctgcctgttccctctgccctttctctggcttcctctgctcctcctcatccctgcaggcaaaggaaaccctctgctgcttccttccccaggagccaggtgggcactgaatgtggtttttagatttttgtattgtggactgtctttgcctcatattaaaaactcatcccatggccgctaggccaccgtgctccaagggagctctcagcagctctgcctagtgtttcgtgctgaactcatcggggctttgcgagtaccttcgtgggtgccaggccagaagtgggttcccatgagcctcctttcccagccactcctgggggacagtgaaggtggtgggcgagtgcttgctgcgccccgctggccttggtatgagatgaagtagagtgtcacggggcaccccgcttcagcaaagggacttgtaactatggacagacggctccctgggcttgctgtccatctggctggaaatcaaaggtccatcttttccatccccaggtctcccaaaatacagctcaggtcttcagaaagcctgcactggggagggagcagattccagagaacagaagaggccatccaaggtcgggcaagagttagagatcccaaagccaaagtcttcctccctcctgaccttcaagcgagtccccaaagggcaaggagagggcagctcatccctcgtccacctgcccaggtggaaaaactgagactgtagaatggccatgacctgtgagctttccctgcctagggttcagggttaatgactaaaatgaacagattggaaatggtcagagagcaaaggctgtccagagcc

SEQ ID NO: 13983 - DNA, 1964 bp, Homo sapiens
  misc_feature 1936, 1937, 1938, 1939, 1940, 1941, 1942, 1943, 1944, 1945,1946, 1947, 1948, 1949, 1950, 1951, 1952, 1953, 1954, 1955,1956, 1957, 1958, 1959, 1960, 1961, 1962, 1963, 1964: n = A,T,C or G
agggagtcgaccacgcatggcgtcctcggagcaggcagagcagccgagccagccaagctctactccaggaagtgaaaatgtgctgcctcgagagccgctgattgccacggcagtgaagtttctacagaattcccgggtccgccagagcccacttgcaaccaggagagcattcctaaagaagaaagggctgacagatgaagagattgatatggccttccagcagtcgggcactgctgccgatgagccttcgtccttgggcccagccacacaggtggttcctgtccagccccctcacctcatatctcagccatacagtcccgcaggctcccgatggcgagattacggcgccctggccatcatcatggcaggcattgcatttggctttcaccagctctacaagaaatacctgctccccctcatcctgggcggccgagaggacagaaagcagctggagaggatggaggccggtctctctgagctgagtggcagcgtggcccagacagtgactcagttacagacgaccctcgcctccgtccaggagctgctgattcagcagcagcagaagatccaggagcttgcccacgagctggccgctgccaaggccaccacatccaccaactggatcctggagtcccagaatatcaacgaactcaagtccgaaattaactccttgaaagggcttcttttaaatcggaggcagttccctccatccccatcagccccgaagatcccctcctggcagatcccagtcaagtcaccgtcaccctccagccctgcggccgtgaaccaccacagcagcagcgacatctcacctgtcagcaacgagtccacgtcgtcctcgcctgggaaggagggccacagccccgagggctccacggtcacctaccacttgctgggcccccaggaggaaggcgagggggtggtggacgtcaagggccaggtgcggatggaggtgcaaggcgaggaggagaagagggaggacaaggaggacgaggaggatgaggaggatgatgatgtgagccatgtggacgaggaggactgcctgggggtgcagagggaggaccgccggggcggggatgggcagatcaacgagcaggtggagaagctgcggcggcccgagggcgccagcaacgagagtgagcgggactagggtgcgcctgctgcctccagccctgaggatggcatctagtgtgcccgtgcgtggccataccctgcctccctctctggccctgggagggcagcttggagcccaggtagggggcagagctgtcctcagctgcactgcggcctggtggcagtgtggggagtcacacttctgtccacctggcctcctctcgcctggccgccagccccagccccagccccagccccaggcccagctgcctttggctttgatctcaagtcaggctgaaggcagcgaagcctcggggcccaagcccctccccagccccctctcccggacagacgccttgcccagggtgtgtttgctgagtgtcttgactaccgtgacaccacgcatggccagagctagcgtccctactgcctcccgactcctcagtggaggaggagctgcggtccctctggtgtctgccatccccctccctccctgggcccggccctggacccgtcaggtgcctgtccccagccccaaccccactcatgccccgtcgtcctcccagacaaatgaaaccacgctgcgcttccgatgcccccgcttgccgtgtaatggttcagctaatcccatggcgagatgggggctcactccggaggaggagccaggcagcagggccttcctgaccaacagccagctctgtccttccccccaggaaacacatgttcatttgtgtgatcatgtatagacctcagaacggaagataggactgtatataattgtaataaataccagttgccactattttaaaaaaaaaaaaaaaannnnnnnnnnnnnnnnnnnnnnnnnnnnn

SEQ ID NO: 13984 - DNA, 1701 bp, Homo sapiens
  misc_feature 1, 10, 1701: n = A,T,C or G
nagcctccanaagtgttgggcttacagccttgagccactatgcttggctcaaagatatttttatgaaagccctgggactatagatttagctgattaaatttatagaaaaagtcctgtcatataaactggcaaagtctgttcttaatttaattagccaaatcagacttaacttccgtcagaacatgtcttggttttaattcagataaacacacaaacatacttctctggcacagccttcagaagcatcagtttttgttttgttttgttttgttttttgagacagggtcttgctctgttgcccaggctggagtgcactggcacaatcacagttcactgcagcctcgacctcccagatccaagcaatcctcccacctaagcctcccaagtagctgggtctataggcgcgtgccaccaccatgcccagctgaattttgtattttttgtacagacagcattttgccatgttgcccaggctggtcccaaacttctagcctccagcaaccctcctgcctcagcctctcaaagggctaggattgcagtcctgggctactgccccccaccctctctttgcgttcttaggagtcatttagaattttttttgatccctttggttagtgcctctggagctgcttacacccaggccatacgccttgatatactggatggttgagaggcagcctgttttttttttttttttttttttggaggatagggagtatggctgttgtgaaaagggaggtaaagagaaatggtagatctgaagaggcctcatcagagcacatattttaggacaacacatatggaaattggacatctttaagttggtttccatagagctatgcatgtatccttacccccatgggaaaatgttggtgtgttctcaagggtatgcatgtgtcattttgaagaccaaggccctagaattgtcaaacttaaggatcataaaaatcatgagggttgcttgttaaaaatgtccaaacgtgcagagactgatctttgagatctggaccaggaatttgcatttgaacaagtgttcctggaatctctatgcaagttttatacagaacatacttttggaatccttgccctagacaggggtgtccaatcttttggcttccctggtccacaatggaagaagaattgtcttggaccacacataaaatacactaacactaacaatagctgatgagctaaaaaaaaaaaaaaaatcgtgagctaccgcacccagccaagttgtaatttttaataaaacttaagaagtaaacattttacttatgtttataggtatttgatcctaaatttgacacatcattgcccatgaaagaatcctcttaggctgctcagcttcactcttcctgcttgcccaccggggtttttcactgcttctgttagcactaagtacttagacgatcctaagatatgtgcttgagccgaatttcatctttacttgtaggaaactttaaactatttcttttctttgctttcttttgtttgtttttttatttgagatggagttttgctcttgtcgcccaggctggagtgcagtggagtgatctcggctcactgcaacctctgcctcccgggttcaaatgattctcctgcctcagcctctcaagtggctgggactacaggcgtgcaccaccacgcctggctaattttgtgtttttggtagagacagagtttcaccatgttggccaggcn

SEQ ID NO: 13985 - DNA, 3937 bp, Homo sapiens
  misc_feature 219, 245, 247: n = A,T,C or G
ccgaagtcgggcgagcgcgccgtgcggcggctgggagtgggctgcaggtgccgcgcggggagcccgcccagacttcggggaggcagcggggcgccgtggccccgcggctcagctccctgccgggtcgggtgtcccagccctgcgacttccggggcccggcggctcctcggggagctcgwmmamaggcagcctccggggcgaaaragcgcgcggcgcggngcgccgggacggtccgcggcacgggntnggagccgccggcgctcgggctcccgcagggcggcgggcggggcggggtgaggcgggccggccgccctcccctctcctccctcccgcarmtarcmctcccttcctccggtcccgcagccaattaggcggccccctcgggcgggaggcgtggggcgctgcataaaacggcggggagctgccamcccgggagcgggctgcgcagtgtccggggccgagccggtgcgccgcagactagggcgcctcgggccagggagcgcggaggagccatggccaccgctaacggggccgtggaaaacgggcagccggacaggaagccgccggccctgccgcgccccatccgcaacctggaggtcaagttcaccaagatatttatcaacaatgaatggcacgaatccaagagtgggaaaaagtttgctacatgtaacccttcaactcgggagcaaatatgtgaagtggaagaaggagataagcccgacgtggacaaggctgtggaggctgcacaggttgccttccagaggggctcgccatggcgccggctggatgccctgagtcgtgggcggctgctgcaccagctggctgacctggtggagagggaccgcgccaccttggccgccctggagacgatggatacagggaagccatttcttcatgcttttttcatcgacctggagggctgtattagaaccctcagatactttgcagggtgggcagacaaaatccagggcaagaccatccccacagatgacaacgtcgtgtgcttcaccaggcatgagcccattggtgtctgtggggccatcactccatggaacttccccctgctgatgctggtgtggaagctggcacccgccctctgctgtgggaacaccatggtcctgaagcctgcggagcagacacctctcaccgccctttatctcggctctctgatcaaagaggccgggttccctccaggagtggtgaacattgtgccaggattcgggcccacagtgggagcagcaatttcttctcaccctcagatcaacaagatcgccttcaccggctccacagaggttggaaaactggttaaagaagctgcgtcccggagcaatctgaagcgggtgacgctggagctgggggggaagaacccctgcatcgtgtgtgcggacgctgacttggacttggcagtggagtgtgcccatcagggagtgttcttcaaccaaggccagtgttgcacggcagcctccagggtgttcgtggaggagcaggtctactctgagtttgtcaggcggagcgtggagtatgccaagaaacggcccgtgggagaccccttcgatgtcaaaacagaacaggggcctcagattgatcaaaagcagttcgacaaaatcttagagctgatcgagagtgggaagaaggaaggggccaagctggaatgcgggggctcagccatggaagacaaggggctcttcatcaaacccactgtcttctcagaagtcacagacaacatgcggattgccaaagaggagattttcgggccagtgcaaccaatactgaagttcaaaagtatcgaagaagtgataaaaagagcgaatagcaccgactatggactcacagcagccgtgttcacaaaaaatctcgacaaagccctgaagttggcttctgccttagagtctggaacggtctggatcaactgctacaacgccctctatgcacaggctccatttggtggctttaaaatgtcaggaaatggcagagaactaggtgaatacgctttggccgaatacacagaagtgaaaactgtcaccatcaaacttggcgacaagaacccctgaaggaaaggcggggctccttcctcaaacatcggacggcggaatgtggcagatgaaatgtgctggaggaaaaaaatgacatttctgaccttcccgggacacattcttctggaggctttacatctactggagttgaatgattgctgttttcctctcactctcctgtttattcaccagactggggatgcctataggttgtctgtgaaatcgcagtcctgcctggggagggagctgttggccatttctgtgtttccctttaaaccagatcctggagacagtgagatactcagggcgttgttaacagggagtggtatttgaagtgtccagcagttgcttgaaatgctttgccgaatctgactccagtaagaatgtgggaaaaccccctgtgtgttctgcaagcagggctcttgcaccagcggtctcctcagggtggacctgcttacagagcaagccacgcctctttccgaggtgaaggtgggaccattccttgggaaaggattcacagtaaggttttttggtttttgttttttgtttttttgtttttaaaaaaaggatttcacagtgagaaagttttggttagtgcataccgtggaagggcgccagggtctttgtggattgcatgttgacattgaccgtgagatttcggcttcaaaccaatactgcctttggaatatgacagaatcaatagcccagagagcttagtcaaagacgatatcacggtctaccttaaccaaggcactttcttaagcagaaaatattgttgaggttacctttgctgctaaagatccaatcttctaacgccacaacagcatagcaaatcctaggataattcacctcctcatttgacaaatcagagctgtaattcactttaacaaattacgcatttctatcacgttcactaacagcttatgataagtctgtgtagtcttccttttctccagttctgttacccaatttagattagtaaagcgtacacaactggaaagactgctgtaataacacagccttgttatttttaagtcctattttgatattaatttctgattagttagtaaataacacctggattctatggaggacctcggtcttcatccaagtggcctgagtatttcactggcaggttgtgaatttttcttttcctctttggggatccaaatgatgatgtgcaatttcatgttttaacttgggaaactgaaagtgttcccatatagcttcaaaaacaaaaacaaatgtgttatccgacggatacttttatggttactaactagtactttcctaattgggaaagtagtgcttaagtttgcaaattaagttggggagggcaataataaaatgagggcccgtaacagaaccagtgtgtgtataacgaaaaccatgtataaaatgggcctatcacccttgtcagagatataaattaccacatttgccttcccttcatcagctaacacttatcacttatactaccaataacttgttaaatcaggatttggcttcatacactgaattttcagtattttatctcaagtagatatagacactaaccttgatagtgatacgttagagggttcctattcttccattgtacgataatgtctttaatatgaaatgctacattatttataattggtagagttattgtatctttttatagttgtaagtacacagaggtggtatatttaaacttctgtaatatactgtatttagaaatggaaatatatatagtgttaggtttcacttcttttaaggtttacccctgtggtgtggtttaaaaatctataggcctgggaattccgatcctagctgcagatcgcatcccacaatgcgagaatgataaaataaaattggatatttgagaaaaaaaaaaaaaaaaaactgcggccgcaagcata

SEQ ID NO: 13986 - DNA, 1585 bp, Homo sapiens
  misc_feature 1, 2, 1576, 1579, 1583, 1584, 1585: n = A,T,C or G
nnaaacgactcctatgggcgaattgcagctcacgcggtgggcgaccgagggcggggaagatgtagctgtgtagtctccttccatagctgctctaagggggctggcaacatggctcagcaggcttgccccagagccatggcaaagaatggacttgtaatttgcatcctggtgatcaccttactcctggaccagaccaccagccacacatccagattaaaagccaggaagcacagcaaacgtcgagtgagagacaaggatggagatctgaagactcaaattgaaaagctctggacagaagtcaatgccttgaaggaaattcaagccctgcagacagtctgtctccgaggcactaaagttcacaagaaatgctaccttgcttcagaaggtttgaagcatttccatgaggccaatgaagactgcatttccaaaggaggaatcctggttatccccaggaactccgacgaaatcaacgccctccaagactatggtaaaaggagcctgccaggtgtcaatgacttttggctgggcatcaatgacatggtcacggaaggcaagtttgttgacgtcaacggaatcgctatctccttcctcaactgggaccgtgcacagcctaacggtggcaagcgagaaaactgtgtcctgttctcccaatcagctcagggcaagtggagtgatgaggcctgtcgcagcagcaagagatacatatgcgagttcaccatccctcaataggtctttctccaatgtgtcctccaagcaagattcatcataacttataggttcatgatctctaagatcaagtaaaaatcataatttttacttattaaaaaattgcaacacaagatcaatgtccatagcaatatgatagcatcagccaattttgctaacacatttctttgggattttgcccttcctggggtataggggatcagaaatattgatccatgtgcacgcagataaaatggcttctgctaaacagactaaaatctttctctctagtctttctcacttgtacctgcccgggcggccgctcgaccgtctttccctttcgccctccacctccttcctgagaccagctgtgtttcagctcccccttccctgggcccacactgaatctctgttacccttacaaacccctgctgcctctaagagtaaggacccctatcccatcccaaactcaaacctaagcacatgcagcctcatcccatttctccaaaacatgtgaaagcaaaagaaaataaaaaactaactcagcaatcttgttcttcctacagtggtctttggctactgctggatgtggcccacttttaacctgtgagagtgccatccagtgaagagacaatgggaatgctacctcccagaggtgagcccagcagggaaaatacaggcttctcaaggctaagggcaggtgctctggggtcaggggtcactgacaggtgctacgtagacagaaaggtgatgcaaacggccagtggccacaccttcaagacatgttgataggggcagggggagatggacaggcatgtggagaagtgaacaggctcgtgtcatctttgttttctacattgtgcaaatgtangcntgannn

SEQ ID NO: 13987 - DNA, 1645 bp, Homo sapiens
ctatagggagtcgacccacgcgtccggagactcgtcaccaggcgtgcagtgggcactgctgggctcccccatcccgtcctaacccggaacagccccgggcaggaggcgtggaaagtcgagggggtaaaccgcgaatgtgcgttgtgtaagccacggcgcagggtggggcgcgggcgggacttgggcgggcggggtgggcttggccgagctggcctccggggcaccgaccgctataaggccagtcggactgcgacacagcccatcccctcgaccgctcgcgtcgcatttggccgcctccctaccgctccaagcccagccctcagccatggcatgccccctggatcaggccattggcctcctcgtggccatcttccacaagtactccggcagggagggtgacaagcacaccctgagcaagaaggagctgaaggagctgatccagaaggagctcaccattggctcgaagctgcaggatgctgaaattgcaaggctgatggaagacttggaccggaacaaggaccaggaggtgaacttccaggagtatgtcaccttcctgggggccttggctttgatctacaatgaagccctcaagggctgaaaataaatagggaagatggagacaccctctgggggtcctctctgagtcaaatccagtggtgggtaattgtacaataaatttttttggtcgacaacgacacacaccacacgcaaaaaaaacacttgtgtgcggcgggcctggccccctgaagaaaaagtttttatgacacactttgtgtgggcgcgctgggccccaagaaggtatacggaacccagtggcaaagagtggtcccaggaagaacccgggacgagaaaggcggtgtggatttcctcccaaaaaaaaaacggccggggggaacaccagcggggtcttgaccaaaatccacagatgggaggtcacggcagcgccaatacgggggactacatcaccagcggggtggcaaagggaggagcccgagattacacattttaaacgcccggcacgtagagagagaaaaagcatgagatagagtcacaggaacgtgagcaacagagacaacgaacgagcaagcagcgacgagagagagacagaatcagagagacagcaggtcgaagtcagcacagaacgacacgcaagtaacacgaagccaaagagcaacagtgaaggagaggaggagcaaaaagaggagaaagcgagatgaggaacccgagagagacggggcagaccgaggagaggaagagaagacagggcacgagagcagaagagagagaaagcaagagcggagaggagacgaagaggtggcgagagaaagcgcagcggtgggagaaggagtgaggacgaggagaggagagaggagaggagaggacgagggagaagagagggagagcggacgataggagcagcacagcaaggacagagcgagacgagggtagagagacgacagagaaggcagtagtgagcgaggaggagtaggagaggagagaagagcgagagagggatgagcagagagcagagagagaaggcagagcgaggacggagaggaaagaacgagagcgggaagtagtaggagacagcgagcgaaggaagccagtgacgagcgagagaacagaagagaggagccacggacga

SEQ ID NO: 13988 - DNA, 2355 bp, Homo sapiens
actggttctttatttcaaaaagacacttgtcaatattcagtatcaaaacagttgcactattgatttctctttctcccaatcggccccaaagagaccacataaaaggagagtacattttaagccaataagctgcaggatgtacacctaacagacctcctagaaaccttaccagaaaatggggactgggtagggaaggaaacttaaaagatcaacaaactgccagcccacggactgcagaggctgtcacagccagatggggtggccagggtgccacaaacccaaagcaaagtttcaaaataatataaaatttaaaaagttttgtacataagctattcaagatttctccagcactgactgatacaaagcacaattgagatggcacttctagagacagcagcttcaaacccagaaaagggtgatgagatgagtttcacatggctaaatcagtggcaaaaacacagtcttctttctttctttctttcaaggaggcaggaaagcaattaagtggtcacctcaacataagggggacatgatccattctgtaagcagttgtgagggggtagagatgggacaaaattttggtctcagaggtcttaccatcttaatttggtaacttctaatgaaaaaaataaaaaatagaaataacattatccaaagatatcttaaagctgaaaacttgaacagcacattttttgtttttgttgttgtttggctaactcctcctggaatcacctttctggtttagctagtactttgtacagaacaatgaggtttcccacagcggagtctccctgggctctgtttggctctcggtaaggcaggcctacaccttttcctctcctctatggagaggggaatatgcattaaggtgaaaagtcaccttccaaaagtgagaaagggattcgattgctgcttcaggactgtggaattatttggaatgttttacaaatggttgctacaaaacaacaaaaaaggtaattacaaaatgtgtacatcacaacatgctttttaaagacattatgcattgtgctcacattcccttaaatgttgtttccaaaggtgctcagcctctagcccagctggattctccgggaagaggcagagacagtttggcgaaaaagacacagggaaggagggggtggtgaaaggagaaagcagccttccagttaaagatcagccctcagttaaaggtcagcttcccgcaggctggcctcaggcggagtctgggtcagagggaggagcagcagcagggtgggactggggcgttctacatctcattcaggtcaagcagggtctggtccagcatcctttgtgtacagaggtgctcctctttggtgcatttcagtttatcttccaggtcatcaattgtcttttccagcttggctaccgatctctcagcaaactcagcacgggtctctgcctccttgagtttatcagtaagaatcttgatttcttcctcatatttatcttctttttgagagtacttttcttcagcagcactcagacacttcaggttctggtccatcagtctaatctgctcatccatctctcggcaacgggactctgccagctcagctcgttcctctgtgcgttccaagtctccttcaatgatcaccaacttacgagccacctacaggaaaagatcccagtatagcttagtgaagcaaaggagccatttaccgcattatgctttgtaaaaggccgataggagagggactaacagaaggtcacttacctcttcatacttcctatctgcctcttctgcaatgtgcttagcttctttgagttggatttcctggagttccagctcttcttcatcttttaaggcccggttttcaataaccttcatacctctctcactctcatcagcagctttttcagcttcttccagcttttgcagggcagtggccaggcgctcctgagcacggtccagctcttcttcaaccagctggatcctacggttcaaggaggccacctcagcctcagcatcagcagccttcttctctgccagttccagcttctcctgggcatccttcaaagcttcagaatacttgtccagctcatcctctgtccctttcagcttcttctgcatggctgccagctcatcctccagctgtttacttctttcttctgcctgcttctgctcagcttcagcttgctctgcccgatccagagcattctccttgtctaacttcagcatctgcatctttttcttgatggcctccatcatgagcagtggctgttggtaggctcacctgtgaacactggagaactggagactggggcaagaaagaaggggctgctgcctgagtgaccaggaggtccccagacttgagtctttatctgtccccgcgt

SEQ ID NO: 13989 - DNA, 2078 bp, Homo sapiens
  misc_feature 2072, 2073, 2074, 2075, 2076, 2077, 2078: n = A,T,C or G
gaattcccgggtcgagccccccccccccccccgggcgggcacaggcggcgagaggcggcgagaggcgggctgaggcggcccagcggcggcaggtgaggcggaaccaaccctcctggccatgggaggggccgtggtggacgagggccccacaggcgtcaaggcccctgacggcggctggggctgggccgtgctcttcggctgtttcgtcatcactggcttctcctacgccttccccaaggccgtcagtgtcttcttcaaggagctcatacaggagtttgggatcggctacagcgacacagcctggatctcctccatcctgctggccatgctctacgggacaggtccgctctgcagtgtgtgcgtgaaccgctttggctgccggcccgtcatgcttgtggggggtctctttgcgtcgctgggcatggtggctgcgtccttttgccggagcatcatccaggtctacctcaccactggggtcatcacggggttgggtttggcactcaacttccagccctcgctcatcatgctgaaccgctacttcagcaagcggcgccccatggccaacgggctggcggcagcaggtagccctgtcttcctgtgtgccctgagcccgctggggcagctgctgcaggaccgctacggctggcggggcggcttcctcatcctgggcggcctgctgctcaactgctgcgtgtgtgccgcactcatgaggcccctggtggtcacggcccagccgggctcggggccgccgcgaccctcccggcgcctgctagacctgagcgtcttccgggaccgcggctttgtgctttacgccgtggccgcctcggtcatggtgctggggctcttcgtcccgcccgtgttcgtggtgagctacgccaaggacctgggcgtgcccgacaccaaggccgccttcctgctcaccatcctgggcttcattgacatcttcgcgcggccggccgcgggcttcgtggcggggcttgggaaggtgcggccctactccgtctacctcttcagcttctccatgttcttcaacggcctcgcggacctggcgggctctacggcgggcgactacggcggcctcgtggtcttctgcatcttctttggcatctcctacggcatggtgggggccctgcagttcgaggtgctcatggccatcgtgggcacccacaagttctccagtgccattggcctggtgctgctgatggaggcggtggccgtgctcgtcgggcccccttcgggaggcaaactcctggatgcgacccacgtctacatgtacgtgttcatcctggcgggggccgaggtgctcacctcctccctgattttgctgctgggcaacttcttctgcattaggaagaagcccaaagagccacagcctgaggtggcggccgcggaggaggagaagctccacaagcctcctgcagactcgggggtggacttgcgggaggtggagcatttcctgaaggctgagcctgagaaaaacggggaggtggttcacaccccggaaacaagtgtctgagtggctgggcggggccggcaggcacagggaggaggtacagaagccggcaacgcttgctatttattttacaaactggactggctcaggcagggccacggctgggctccagctgccggcccagcggatcgtcgcccgatcagtgttttgagggggaaggtggcggggtgggaaccgtgtcattccagagtggatctgcggtgaagccaagccgcaaggttacaaggcatcctcaccaggggccccgcctgctgctcccaggtggcctgcggccactgctatgctcaaggacctggaaacccatgcttcgagacaacgtgactttaatgggagggtgggtgggccgcagacaggctggcagggcaggtgctgcgtggggccctctccagcccgtcctaccctgggctcacatggggcctgtgcccacccctcttgagtgtcttggggacagctctttccacccctggaagatggaaataaacctgcgtgtgggtggagtgttaggaccaaaaattaaaaaaaaaaccgcgcccgctcttcttggcctcgagggccaaannnnnnn

SEQ ID NO: 13990 - DNA, 926 bp, Homo sapiens
cagattggagctcaccgcggtggcggccgaggtacgcgggacctcattcatttctaccggtctctagtagtgcagcttcggctggtgtcatcggtgtccttcctccgctgccgcccccgcaaggcttcgccgtcatcgaggccatttccagcgacttgtcgcacgcttttctatatacttcgttccccgccaaccgcaaccattgacgccatgtcgggttattcgagtgaccgagaccgcggcgggaccgagggttgggtgcacctcgattctggaggacgtagggcagggcccttatctggaaacgaagttgtgaaaccctggggagaaattagttacacaagaagtgattcttgattgagctgctaaatttgagacgaatttttatcacgagcacccctgattgtggctaggcgcacaagcacaagaggtggaaactttacagaagacgcaggacacttcacagttcagaggtcaccaatgccgaaagccagttctaaattcttatgaagcaatttccctgcaagtgtcatggatgtatggccagacggaatttcactgaaaccactgtattcagctcagggatgccagttgctctacgtggatcgcctatggtggaggggccagactggtcctgcgaaaccatggcttattgcttcctggccattgtcccatcaatcatcagcattctagaaaaacgcgatgcgcacttgttggtgcggccacactcggactggccccacggtgcgcagtactcgccgaattgacagctgtcgcgagcaactgtctccggggcccagagccacatgtcttggaagcgtggctgtttgcccccgacactcgtttgggaccctgaaacacttcttttcgtatgtggttcccccaaattactcagacccttccgcgacgcgaataaagcggggacc

SEQ ID NO: 13991 - DNA, 1005 bp, Homo sapiens
ccacgcgtccggcctcactcccgagctctactgactccaacagagcgcccaagaagaaaatggccataagtggagtccctgtgctaggatttttcatcatagctgggctgatgagcgctcaggaatcatgggctatcaaagaagaacatgtgatcatccaggccgagttctatctgaatcctgaccaatcaggcgagtttatgtttgactttgatggtgatgagattttccatgtggatatggcaaagaaggagacggtctggcggcttgaagaatttggacgatttgccagctttgaggctcaaggtgcattggccaacatagctgtggacaaagccaacctggaaatcatgacaaagcgctccaactatactccgatcaccaatgtacctccagaggtaactgtgctcacaaacagccctgtggaactgagagagcccaacgtcctcatctgtttcatcgacaagttcaccccaccagtggtcaatgtcacgtggcttcgaaatggaaaacctgtcaccacaggagtgtcagagacagtcttcctgcccagggaagaccaccttttccgcaagttccactatctccccttcctgccctcaactgaggacgtttacgactgcagggtggagcactggggcttggatgagcctcttctcaagcactgggagtttgatgctccaagccctctcccagagactacagagaacgtgggtgtgtgccctgggcctgactgtgggtctggtgggcatcattattgggaccatcttcatcatcaagggagtgcgcaaaagcaatgcagcagaacgcagggggcctctgtaaggcacatggaggtgatggtgtttcttagagagaagatcactgaagaaacttctgctttaatgactttacaaagctggcaatattacaatccttgacctcagtgaaagcagtcatcttcagcgttttccagccctatagccaccccaagtgtggttatgcctcctcgattgctccgtacct

SEQ ID NO: 13992 - DNA, 2852 bp, Homo sapiens
  misc_feature 2800: n = A,T,C or G
acgcggggggattcccttctgtcgcgcggccttatagttccggctgtggcgcgcggacggaaagtttatgccgacggaaagtttatgccgacggactgtgtccggcgatgggcacgggcatttcttcgtttatagctgtctgtttgcattctgattgggaacactgggatcattttcatcatgccgacagtggtggtaatggatgtatccctttccatgacccgacctgtgtctattgaggggtccgaggaataccagcgtaagcacctagcagcccatggtttaacgatgctgtttgagcacatggccacaaattacaagcttgaatttacagcacttgtggttttttcatcactttgggagttgatggtccccttcacgagagattataataccctacaggaagcactaagtaatatggatgattatgacaaaacctgcttggagtctgcattagttggtgtttgcaatatcgttcagcaagaatggggtggtgcaattccttgccaggttgtcctggtgacagacggctgtcttggcattggtagagggtcactgcgacattccctagccactcaaaatcaacgaagtgagagcaacaggtttccactaccttttcctttcccatctaagttatatatcatgtgcatggcgaatttggaggagctccagagcaccgattccttggaatgccttgaacgtctcatagatttaaacaatggtgaagggcagatttttactattgatggccccctgtgcttgaagaatgtacagtctatgtttggaaaactgatagatttggcatatacgcctttccatgctgttctcaagtgtggccacctaactgctgatgtacaagtcttccccaggccagaaccttttgttgtagatgaagaaattgatcctatccctaaagtcattaacacagatttggaaatagtgggatttattgatatagctgatatttcaagtcccccagttctgtccagacatctggtcttacctatagcacttaacaaagaaggtgatgaggtgggtactggcatcactgatgacaatgaagatgaaaattcagccaatcagattgcaggcaaaatacccaacttttgtgtcctgctccatggtagcctaaaagtggaaggaatggtagcgattgttcaattaggtcctgaatggcatggaatgctctactcccaagctgacagcaagaagaaatcaaacctcatgatgtctctctttgagcctggcccagaacctctcccatggctagggaaaatggcacagttgggtcctatttcagatgctaaagaaaacccttatggcgaggatgacaataagagtccattccccctgcagcccaaaaacaaacgcagttatgcccagaatgtgactgtctggatcaaacccagcggcctgcagacagatgtacagaagattttaagaaatgcaaggaaactacctgaaaaaacacagacattctataaggagctgaaccgtttgcgaaaggccgctctagcctttggtttcctggacctgctgaaaggggtggctgacatgctggaaagggaatgcagcactgctgcctgagacagcccaccctgatgctgcattccagctgacccatgctgcccagcagctcaagctggccagtaccggcacctctgagtatgccgcttatgaccagaacatcacacctttgcacacggacttctctgggagcagcactgaaagaatttgaaactgacttttggagctttccttcttttttcatttcaactgaaaatgatttaggtaaaaacctttccagtatgttcacctctagaatagccacccaaagaccttcctgaggctgcctcagaagcaccacttgctgttttgaatgactctactagtatgagaaggatgtgaaggtggttggctggttgggctttaacttcctgggattcataatttttaagcttggaagatagctgctgttcccatgatgggcacatttcctgagaagcttgaatgactgatgagcatagagcacccctgccttcctcaggaaacctgaccggcaggggctctctggcttcctgaaagcttcacctcttccctcgtttatatctcaactgtaagggcattttcaagcttctgttcatggaatgagcaactcagactgtctggagcttgctgagtacaaacacaccaccactaagtttcagaactttccttagaacttgggcaaaatgtggtggtaactcttaagtgcttttggtatctcttgagattctaacttttaaagagcaaccattaatgtgtaaaatgattcctattattcaaggtttttttttaatgaaaataaaatatttgattttcctaggaacaacaaaacatcaacaaaaacaggaacaaagaaaaaaacatacactagcacaagagacaagccaacaacagcacaaaacaaaaaacgggggggggcgcggactaaaaagaccccccagagggccccaatagaacgccacccccatttttgttgtaaaaaaagggggccccaaatgaggagggccaaaaaaaagcagccagagagcgcgggggcgttaaacacaccacaggcgtggggcgggagaaaaacagtccgccgggtcaccttgggaaacagcacccccatgctggcgggcgccatcgggcgccccacccaccaaaagattaggcgacgggcacaagaacacgtggggtgctcaggtgtgcaccccgctctgttcgtcggcgcggaatctggcctctttcttctattaccgccggcgtacataaccgnggcaacacagacgaaacagtgacacgcaggatcaccaacagggaaagcagaa

SEQ ID NO: 13993 - DNA, 791 bp, Homo sapiens
  misc_feature 1, 2, 62, 63, 64, 65, 66, 67, 68, 69, 70, 71, 72, 73, 74,75, 76, 77, 78, 79, 80, 81, 82, 83, 84, 85, 86, 87, 88,89, 90, 91, 92, 93, 94, 95, 96, 97, 98, 99, 100, 101, 102,103, 104, 105, 106, 107, 108, 109, 110, 111, 112, 113, 114: n = A,T,C or G
  misc_feature 115, 116, 117, 118, 119, 120, 121, 122, 123, 124, 125, 126,127, 128, 775, 778, 783, 784, 785, 786, 787, 788, 789, 790,791: n = A,T,C or G
nnagctgtttcctgtgaggaaaagaacggccggggcccctggtcggggttgtttgcttcctnnnnnnnnnnnnnnnnnnnnnnnnnnnnnnnnnnnnnnnnnnnnnnnnnnnnnnnnnnnnnnnnnnnggcagaacgagcatcctgtctttgcctacctgaaagacaagctgccctacccttatgatgacccgttctccctcatgaccgatcccaagctcatcatatggagtcccgtgcgccgctcagacgtgtcctggaactttgagaagttcctcatagggccagaaggggagcccttccgtcgctacagccgcagcttccagaccatcaacatcgagcctgacatcaaacggctcctcaaagttgccatctagatgagagctgctcagcccaggaatctcccactgtttcccctgagcagtcttcctcagggctcagtgtaccctcgggagaccctgggagaccaaggcattccctgaatatcgtccccttgccttccctaccggccatttcctttagctccctcaaggctcttggggagtttgcttggggctctaagtctggggtaggttctgggccttcacagaatgatggcatcttcctaaacccttctgggagatgtctgagaagttgtgaagggtccagagccagtctgctttagagtccaataaagtgtaggtgtggcaaaaaaatggtgcctccctccggaaaatggtgaagaaaattgaaatcagccagcacgccaagtacctgcccgggcgaaagctctcccnctngtggnnnnnnnnn

SEQ ID NO: 13994 - DNA, 744 bp, Homo sapiens
  misc_feature 1, 2, 3, 680, 739, 742, 743, 744: n = A,T,C or G
nnncttgcggccgcgggagggtccttgtggcgccgggcggcggggtcctgcgtggagagtgggacgcaacgccgagaccgcgagcagaggctgcgcacagccggatccggcactcagcgaccggacccaaggatccgccggggaacaagccacaggagagcgactcaggaacaagtgtgggagaggaagcggcggcggcggcgccgggcccggtggtggtgacagcaggtctgaggttgcatcataaatacaaaggactgaagttataaaagagaaaagagaagtttgctgctaaaatgaatctgagcaatatggaatattttgtgccacacacaaaaaggtactgaagatttaccccccaaaaaaaattgtcaatgagaaataaagctaactgatatcaaaaagcagagcctgctctactggccatcatgcgtaaaggggtgctgaaggacccagagattgccgatctattctacaaagatgatcctgaggaactttttattggtttgcatgaaattggacatggaagttttggagcagtttattttgctacaaatgctcacaccaatgaggtggtggcaattaagaagatgtcctatagtgggaagcagacccatgagaaatggcaagatatccttaaggaagttaaatttttacgacaattggagcatcctaatacntatgagtacaaaagctggtactttgaagaacacactggctgggttggggatggaatatngcnnn

SEQ ID NO: 13995 - DNA, 859 bp, Homo sapiens
ctgattgacaatgagaatatttattgagggtttattgagtgcagggagaagggcttgatgccttggggtgggaggagagacccctcccctgggatcctgcagctctagtctcccgtggtgggggtgagggttgagaacctatgaacattctgtatgggccactgtcttctccacggagctcccttcatgcgtgacctgtcagctgtagcttctgtgggacttccactgctcaggcgtcaggctcaggtagctgctggccgcgtacttgttgttgctttgtttggagggtgtggtggtctccactcccgccttgacggggctgctatctgccttccaggccactgtcacggctcccgggtagaagtcacttatgagacacaccagtgtggccttgttggcttgaagctcctcagaggagggcgggaacagagtgaccgagggggcagccttgggctgacctaggacggtcagcttggtccctccgccgaatgatctatgattaccactgctgtctgttgagtaacagtagtagacagcttcatcctccacctgggccccactgatagtcaaggtgtccattgtccctgagctggagccagagaatctctcagggatcccggagggtcgtttgctgtcctcatagatgaccagcacaggggcctggcctgacttctgctggtaccaataagcatatttttttggcaatgcatctccagagcaggtgatcctggccgtttgtcctggggacactgacaccgagggtggctgtgtcagctcataggaggcctcagagactgtgcagaaagtaagaagggggagcaggagaggggtccaggccatggtgagattcccagagctc

SEQ ID NO: 13996 - DNA, 840 bp, Homo sapiens
  misc_feature 1, 2, 3, 4, 5, 6, 7, 8, 9, 10, 11, 12, 13, 14, 15, 16, 17,18, 19, 20, 836, 837, 838, 839, 840: n = A,T,C or G
nnnnnnnnnnnnnnnnnnnngcgcgtgaagggggatctgtgtgcccaggagcagcagtttgggggggtcccagacagccagggcgttgacagggtgcgtggggccttgggtgagaggcggaccgatgtcaggtgtggtcgcgaggctcacaagcaaggagacagtggcgtgatatttcatgcgagggtggcactgggagcagaagagtgtgtacccagtgtggaaaagaaagtgtgtgtttcaatgcatggagatgtatcttcattatacacagcgtagtgcagacagtccttccaaagacatccgtaatatttggatcggcgccattttgcagcagaagagttgcacaagcctcctgcctcagttgtacagccttgatcagaggtgtcctgtcttcacggtcgcagaggttaagctcacatcttctggacaccaggagatgtaccatttccggttggccagtggcacaggccaaatgtagggcagtcctttccttcctgtctctcttattggcgtcataatacgtgagcagaaggtacttcagtttctccagattaccacgtaagacagctctgtggatcctcttcagatgatacggtttaatgtagtaatggggaaatgcgaagccatccgagcacaagcgctccatgagggtgggccacctctcccgctcggtcgtcttccgtaatcgtcggctgcaaattgtagcctgcagccgtatttcagctcgccttcggggatcgccgcctccgaagagcaacacaggcaaagcagtctgtgcacggacctccgcgcagactctcagcgcctcccgcctctccgcagaaacgcccgannnnn

SEQ ID NO: 13997 - DNA, 1095 bp, Homo sapiens
acaaggcatgatgagtccttttgcttttaggcttttgacttctggttttagactttctttagcttctgttgttagacaacattgtgcaagcttggtttttataagtttgcatggattaaactgaacttaatgaaattgtccctccccccaaattctcagcacaatttttaggcccacaaggagtcaagcacctcaaggagatcttcagtttgaacttggtgtagacacagggatactgatgaatcaatattcaaattagctgttacctacttaagaaagagaggagaccttggggatttcgaggaagggttcgtaagggagattttagctgagaaataccatttgcacagtcaatcacttctgaccaagttatcagaaaaaggagaaaagaatgtctccccactaaatgttctagggtggtgagaaatctagggtggttatctaaatcaacaatatttagatattccaatatctaaatattgttggaaatactctcctgaagtgttcattgaactctaagagagacagcttgtgtatcagtggcagggtttaaggttcattttttattcccatattaatccttaataatttagacaaatttccttctgagtttaaggataaaatgggatgggttctgcctgggcctggccctcatggggacatcaaagggcaatgttgcaaaaaaaaaaaaaaaaaaaatcagaccatcagattgcatggggggaaccacccccataattaaattacctccacccagtcccacccttgacacctggagattatggggattgcaattcaaggtgagatttgggtggagacatacagccaaagtatattattcaaataagaaatcaaaagagaaattggaaagttcattgagctgaaaatgaaaacccgatatatcagaatcagggagttgcagctaatgtatgcttgggggcaaatttaagcactaagatcctatattataacaaaaaagaaaggtctcaaatcagtgacctgagttttcaccttcagaaactggaaagagaagagcaaattaaacacaatgtaagcagataaagaaaataataaaaagaacagaaatcaatgaaa

SEQ ID NO: 13998 - DNA, 1000 bp, Homo sapiens
  misc_feature 1, 972, 974, 977, 978, 979, 980, 981, 982, 983, 984, 985,986, 987, 988, 989, 990, 991, 992, 993, 994, 995, 996, 997,998, 999, 1000: n = A,T,C or G
natagggagtcgaccacgcgtccgcacgcgtccgcgcgcgggcccccgccagtcaggtgggtgccaggccctggccgtggcgaaagagccggcggagccggagacccgctcccggagacgccgcctcgcgatccccgcgcgggcgggaccgggcggccggcatcatgaccctgtttcacttcgggaactgcttcgctcttgcctacttcccctacttcatcacctacaagtgcagcggcctgtccgagtacaacgccttctggaaatgcgtccaggctggagtcacctacctctttgtccaactctgcaagatgctgttcttggccactttctttcccacctgggaaggcggcatctatgacttcattggggagttcatgaaggccagcgtggatgtggcagacctgataggtctaaaccttgtcatgtcccggaatgccggcaagggagagtacaagatcatggttgctgccctgggctgggccactgctgagcttattatgtcccgctgcattcccctatgggtcggagcccggggcattgagtttgactggaagtacatccagatgagcatagactccaacatcagtctggtccattacatcgtcgcgtctgctcaggtctggatgataacacgctatgatctgtaccacaccttccggccagctgtcctcctgctgatgttcctcagtgtctacaaggcctttgttatggagaccttcgtccacctctgctcgctgggcagttgggcagctctactggcccgagcagtggtaacggggctgctggccctcagcactttggccctgtatgtcgccgttgtcaatgtgcactcctaggcttggtgtctcagacattgatgtaccttttccctgcctcgctccaggttttagtgaagtaaacagtatttggaaagttaaaaaaaaaaaaaaagcagactgggggtctaaaaaaaaaaaaaaaaaagggggngntcnnnnnnnnnnnnnnnnnnnnnnnn

SEQ ID NO: 13999 - DNA, 473 bp, Homo sapiens
acgcgggggagacacattcagaggtgagcccagagcgggtaaagtggactggggagaacttcggaggatgttcatgtccaggagcagccccacgccctgtatggtcggtgtctagagcctcacagcaactaagaccaacccagctctcagaagaaggaatgtcaaaatgtcatgttcaattttacattcagtgcctggaatcttttcttcacaattgaaatgaaatgtgctgaaggaggtgaatccatgcattaatcttcagctcacaaaggaaatactacataagaagcaaggaacacgcaagagatctacagctctgatctccaggatagtgaaatgaggtggtgaatgataagggtataatttagccagctcagtgaataaataatcattgcaaatgaagcagtagcaccagaccacagactcaagacggacataattggattttttttgccatggcctggaaagaaagg

SEQ ID NO: 14000 - DNA, 1466 bp, Homo sapiens
  misc_feature 1, 1466: n = A,T,C or G
naatacgtctggctgtttattttcttcgtatgtcggttgctctgtgttcgtctctctacaagactcatcctctgtcactacgagtgtagatagacgggagtgttccctctcttctatcttttctttacttctcttgttcgggtgtgtcattcatatgactggtgtgcgccattcccacgtgatcatactgtctgttgcttgtcgtgctcagctttgcacatatatatttctgcgtgagttatgttcatacctttgtttgtgctttttctcttgtcacccgacggggcgggctggggtgtgccggggctggagctccccgtggacacagcgcctgcaggcaccactggtgactgggagcccggggatgggctctgcccgttggccgccagtggggacgcatggccacggctgcgagcctccatcatctccaggaagatgccgtagttctggtcctccgtctcctgctgcaccgacagctcctccagcgtggcgtccatgtccagctggttcgtctccagctgccgcaacagcgtctccctctgaagctgcaaaaatgggatattgaagaacttatgaaggtactttaggccgaagctgttcttcatggaagactcagcatagcggaagtaggaggaacctggaggtctgtccaggttgtcgatgaagtcacgcacgtcgtccggcaggatgactcggtgctcgcccatgtcccggtagttccccagcacgcacactggcacgtgggtgggcacttttggaagctcccggagaatgtaattgaaggtccactgcttggtaatgtcgaacatcatgaccaccccgttgcagttcttgtacacgtccaggaactcagcatccagggccatttcagactccgcctcctgggggtcgttctccatctttaagccgtcgcctcgctttttgcattttcctttgtctactacatcccagacttcaaccttcacgatgtcatccgtggtcttgtagctccagtggatgctggtgacctggatctcctgtgtggggatgtactcctccacgaacggccggccctgcaggcggtgccacagcgctgtcttgcccgtgttcctgtctccccggatcactatcttcatgttgtactgcacccccttggcgaagcgcctctgcaacgcctggttcatggactgcagcccggcggggatgttcttgtcccggcccggggcttgctccgaccccaccagcttcttcaacgcggagaacatgttcctgctgaacgtgcgagctgggctggcctgcgagctcagcgacggcggcagcgcagcgcgcctcgctccatgtccggccggcccaggcttcccccaaggctggagcaggcgcggctacaagccggggccagatggcgggtgcagcctcgagcgaggttctggggcctcagcttctatggctccgctcaggcttccacggccctcggcgtagcagccagn

SEQ ID NO: 14001 - DNA, 1476 bp, Homo sapiens
  misc_feature 1304: n = A,T,C or G
attaattaacgcgggggggtgagacttgcctgctgctctggcccctggtcctgtcctgttctccagcatggtgtgtctgaggctccctggaggctcctgcatggcagttctgacagtgacactgatggtgctgagctccccactggctttggctggggacaccagaccacgtttcttggagtactctacgtctgagtgtcatttcttcaatgggacggagcgggtgcggttcctggacagatacttctataaccaagaggagtacgtgcgcttcgacagcgacgtgggggagttccgggcggtgacggagctggggcggcctgatgaggagtactggaacagccagaaggacttcctggaagacaggcgggccgcggtggacacctactgcagacacaactacggggttggtgagagcttcacagtgcagcggcgagtccatcctaaggtgactgtgtatccttcaaagacccagcccctgcagcaccacaacctcctggtctgttctgtgagtggtttctatccaggcagcattgaagtcaggtggttccggaatggccaggaagagaagactggggtggtgtccacaggcctgatccacaatggagactggaccttccagaccctggtgatgctggaaacagttcctcggagtggagaggtttacacctgccaagtggagcacccaagcgtgacaagccctctcacagtggaatggagagcacggtctgaatctgcacagagcaagatgctgagtggagtcgggggctttgtgctgggcctgctcttccttggggccgggctgttcatctacttcaggaatcagaaaggacactctggacttcagccaagaggattcctgagctgaagtgcagatgacacattcaaagaagaactttctgccccagctttgcaggatgaaaagctttccctcctggctgttattcttccacaagagagggctttctcaggacctggttgctactggttcagcaactgcagaaaatgtcctcccttgtggcttcctcagctcctgttcttggcctgaagccccacagctttgatggcagtgcctcatcttcaacttttgtgctcccctttgcctaaaccctatggcctcctgtgcatctgtactcaccctgtaccacaaacacattacattattaaatgtttctcaaagatggaaaaaaaaaaaaaaaaaaaaaaaaaaaaaaaaaaaaaaaaaaaaaaaaaaaaaaaaaaaaaaaaaaaaaaaaaaaaaaaaaataaaaaaaaaaaaaccttgcggcccccttggcccaagngatttttaaactggggcaggttttagcatgggcccgaatttggggttaattgggcaaattcgccctatggggggccatttaaaatcaatggcccgggtttaacaacgtcggaactggaaaaccctgggtgtccccaattaaatgccttggatccccttttcccagttggcgc

SEQ ID NO: 14002 - DNA, 4276 bp, Homo sapiens
gaaacgatgaaatgatgaagaaatgatatgaaatgatggaatgaaatgatgaaatgaagtgaaataatgaaatgatgaaataaggaaatgaaatgaattgacgaaatgatgaaatgaatgacgaaatgaaaagatgaaatgaaataaatgagatgaaaagatgctatgaattgatgagatgaaatgaaatcatgagatgaaatgatgagatgaaatcatgagatgaaatgatgagatgaagtgaaatgatgaaatgatgagatgaaatgatgaaatgaaataatgaaatgaaaggatgaaatgatgagatgaaatgatgaaatggaatgatgaaatgaaatgatgaaatggtgaaatgaaatgaggaaatgaaatgaagaaatgaaatgaagtgaaatgatgaaatgaaatgaaatgatgaaatgaaaagatcaaatgatgaaatgaagaaatgatatgaaatgatgaagtgaagtgaaatgattaatgaaataatgaaatgatgaattgatgaaatgaaatgatgagatgaaaacgatcaaatgaaatgatgaaatgagatgaaaagatgctatgaaatgagatgaaatgaaatcatgagatgaaatgaaatcatgagatgaaattatgaaatgatgagatgaagtgaaatgatgaaatgaggaaatgcaatgatgagatgaaatgaaatgaaataatgaaatgaaaggatgaaatgagatgaaatgatgaaaggatgaaatgaaatgatgaagtgatgaaatgaaatgataagtcaaatgatgaaatgatgaaatggaaagatgaaatgatgaaatgatatgaaatgaaatgatgaaatgatattaaatgatgaaatgatgaaatgaagtcaaatgatgaaatgatgaagtaaatgaaatgaattgatgaaataatgaaatgatgagatgaaatgaaatgatgaaatgatgaaatggaatgatgaaatgaaatgatgaaatggtgaaatgaaatgaggaaatgaaatgaaatgatatgaaatgatgacatgaagtcaaatgatgaaatgatgaaataaatgaaatgatgaaatgagataatgagatgaaatgaaatcatgagatgaaatgatgaaatgaaatgaaatgatggatgaaattatgagatgaaagatgaagtgtaatgagatgaaatgacataatgaaatgaaataatgaaatgagatgaaataaaataatgaaatgatgaaataatgaaatgaaaatgaaatggaaatgatgagatgagaagaaatgatgagatgaaatgatgaaatgatgagatgagataaaatgagatgaaatgatgagatgagatgaaatatgatgagatgaaatgacataatgaatgaaatgatgaaatggaataatgaaatggaaatgatgagctgagatgcaatgagttgaaatgagatgaaatgatgaaatgatgagatgaaatgatgagatgagatgtgatgaaatgatgacatgaaatgatgacataaaatgagatgaaatgagatgtcatgatggaatgagatgagatgaaatgagatgaaatgatagatgagatgaactgatgatatgaaatgatgagatgaatgatgagatgatgagatgaatgatgaaatgaaatgatgagatgagatgatgaaatgaaatggtgagatgaaatgatgagatgaaatgaaatagtgaaatgaaattgaaataaaatcgaaatgagagatgaaatgatgagatgatgaaattgatgaaatgatgagatgtgatgagatgaaatgatgagatgagatgagatgacatgaaataatgaaatgaaattgaaatgagataagatacgagatgagatgaaatgatgagatgaaatgatgaaatgatgagataagatgaaaagagttgatgagatgatgagatgaaatgagatgaaaagatgaaatgatgagatgaaatgaaatgatgagatgaaatgaggtgaaatgaaattagatgaaatgtaatgagatgaaatgaaatgacataatgaaatgaaataatgaaatgagatgaaataaaataatgaaatgatgaaataatgaaatgaaaatgaaatggaaatgatgagataagaaatgatgagatgaaatgatgaaatgagatgagataaaatgagatgaaatgatgagatgagatgaaatatgagatgaaatgacataatgaatgaaatgatgaaacggaataatgaaatggaaatgatgagctgagatgcaatgagttgaaatgagatgaaatgatgaaatgatgagatgaaatgatgagatgagatgtgatgaaatgacatgaaatgatgacataaaatgagatgaaatgagatgtaatgatggaatgagatgagatgaaatgagatgaaatgatagatgagataaaatgatatgaaatgatgagatgaatgatgagatgatgagatgaatgatgaaatgaaatgatgagatgagatgatgaaatgaaatggtgagatgaaatgatgagatgaaatgaaatagtgaaatgaaattgaaataaaatcgaaatgagatgaaatgatgagatgatgaaataaaatgatgaaatgatgagatgtgatgagatgaaatgatgagatgagatgagatgacatgaaataatgaaatgaaattgaaatggccgtgtttccttccatcgtcgggcgccccagacaccagggcgttatggtgggcatgggccagaaggactcctacgtgggcgacgaggcccagagcaagcgtggcatcctgaccctgaagtaccccattgagcatggtcattgttaccaactgggacgacatggagaagatctggcaccacaccttctacaacgagctgcgcgtggccccggaggagcacccagtgctgctgaccgaggcccccctgaaccccaaggccaacagagagaagatgactcagattatgtttgagaccttcaacaccccggccatgtacgtggccatccaggccgtgctgtccctctacgcctctgggcgcaccactggcattgtcatggactctggagacggggtcacccacacggtgcccatctacgagggctacgccctcccccacgccatcctgcgtctggacctggctggccgggacctgaccgactacctcatgaagatcctcactgagcgaggctacagcttcaccaccacggccgagcgggaaatcgtgcgcgacatcaaggagaagctgtgctacgtcgccctggacttcgagcaggagatggccaccgccgcatcctcctcttctctggagaagagctacgagctgcccgatggccaggtcatcaccattggcaatgagcggttccggtgtccggaggcgctgttccagccttccttcctgggtatggaatcttgcggcatccacgagaccaccttcaactccatcatgaagtgtgacgtggacatccgcaaagacctgtacgccaacacggtgctgtcgggcggcaccaccatgtatccgggcattgctgacaggatgcagaaggagatcaccgccctggcgcccagcaccatgaagatcaagatcatcgcacccccagagcgcaagtactcggtgtggatcggtggctccatcctggcctcactgtccaccttccagcagatgtggattagcaagcaggagtacgacgagtcgggcccctccatcgtccaccgcaaatgcttctagacggactcagcagatgcgtagcatttgctgcatgggttaattgagaatagaaatttgcccctggcaaatgcacacacctcatgctagcctcacgaaactggaataagccttcgaaaagaaattgtccttgaagcttgtatttgatatcagcactggattgtagaacttgttgctgattttgaccttgtattcaagttaactgttccccttggtattaacatgtcagggctgagtgttctgggatttctctagaggctggcaagaaccagttgtttttgtcttgcgggtctgtcagggttggaaagtccaagccgtaggacccagtttcctttcttagctgatgtctttggccagaacaccgtgggctgttaacttgccttgagttggaagcggtttgcatttacgcctgtaaatgtattcattcttaatttatgtaaggttttttttgtacgcaattctcgattctttaaagagatgacaacaaatctttggttttctactgctatgtgagaacattagggccccagcaacacgtcattgtgtaaggaaaaataaaagtgctgccgtaa

SEQ ID NO: 14003 - DNA, 3123 bp, Homo sapiens
  misc_feature 1, 3123: n = A,T,C or G
nacgcgtcgggcgccgaacccgcccagctggctgagacgcgtgcggcctggcggcgagtgggggcgtgcgacggttactctggttactggggccgcgccgcgctggcgagagccgccgcccgcgagggatgctggtgaggaagccgtcgggagccgccgccgccatctgagggaggtaccctggaaaccaccttttatcggtggggaagtgcagtcgcggtgggcggctctgggggccagcgaaacgggaggcctctaaatctttaggttggggctgcattgccctggagccgcactcttgagtccgaggccatcttttgttggagaaggcgtcggcgttggcgttttcccgaggttgggctgtacagtgtctccgtccgcggaaaaagaagcctctgaacccgcgccggcccgcagcccccgtgccttccggccgctgctcgccgtcgccagaggctaggccacgtttcccccagtgccgaggtgtttctgtgaccctccctccactcccattcccttctgaaagggcacctgctcttggtgagaaaagaaattatagcacgaagagccagtatcagaagagtatccatcacccgcagcaaccgctcagggaacaccatcaaaaaagaaaaaaagggaatatctggatttcctgggcgaggaggagcgagtctgctcgggagctgttccagcaggcgatttttaaatactgctttctacgccctatacaacttggcttcacatacttttacactaactttatatgatttttaaaaactggtctgatcggacttctcgtcctgggacactgtttactggagtctggccggctctccgtgctcctcttggtacctcattttggggagaaccttaaacccactcgagcagataatctccgccttgaccggtgccaccaaagaagccttggaaccatgtggacttttctgggcattgccactttcacctatttttataagaagttcggggacttcatcactttggccaacagggaggtcctgttgtgcgtgctggtgttcctctcgctgggcctggtgctctcctaccgctgtcgccaccgaaacgggggtctcctcgggcgccagcagagcggctcccagttcgccctcttctcggatattctctcaggcctgcctttcattggcttcttctgggccaaatccccccctgaatcagaaaataaggagcagctcgaggccaggaggcgcagaaaaggaaccaatatttcagaaacaagcttaataggaacagctgcctgtacatcaacatcttctcagaatgacccagaagttatcatcgtgggagctggcgtgcttggctctgctttggcagctgtgctttccagagatggaagaaaggtgacagtcattgagagagacttaaaagagcctgacagaatagttggagaattcctgcagccgggtggttatcatgttctcaaagaccttggtcttggagatacagtggaaggtcttgatgcccaggttgtaaatggttacatgattcatgatcaggaaagcaaatcagaggttcagattccttaccctctgtcagaaaacaatcaagtgcagagtggaagagctttccatcacggaagattcatcatgagtctccggaaagcagctatggcagagcccaatgcaaagtttattgaaggtgttgtgttacagttattagaggaagatgatgttgtgatgggagttcagtacaaggataaagagactggagatatcaaggaactccatgctccactgactgttgttgcagatgggcttttctccaagttcaggaaaagcctggtctccaataaagtttctgtatcatctcattttgttggctttcttatgaagaatgcaccacagtttaaagcaaatcatgctgaacttattttagctaacccgagtccagttctcatctaccagatttcatccagtgaaactcgagtacttgttgacattagaggagaaatgccaaggaatttaagagaatacatggttgaaaaaatttacccacaaatacctgatcacctgaaagaaccattcttagaagccactgacaattctcatctgaggtccatgccagcaagcttccttcctccttcatcagtgaagaaacgaggtgttcttcttttgggagacgcatataatatgaggcatccacttactggtggaggaatgactgttgcttttaaagatataaaactatggagaaaactgctaaagggtatccctgacctttatgatgatgcagctattttcgaggccaaaaaatcattttactgggcaagaaaaacatctcattcctttgtcgtgaatatccttgctcaggctctttatgaattattttctgccacagatgattccctgcatcaactaagaaaagcctgttttctttatttcaaacttggtggcgaatgtgttgcgggtcctgttgggctgctttctgtattgtctcctaaccctctagttttaattggacacttctttgctgttgcaatctatgccgtgtatttttgctttaagtcagaaccttggattacaaaacctcgagcccttctcagtagtggtgctgtattgtacaaagcgtgttctgtaatatttcctctaatttactcagaaatgaagtatatggttcattaagcttaaaggggaaccatttgtgaatgaatatttggaacttaccaagtcctaagagacttttggaagaggatatatatagcatagtaccataccacttataaagtggaaactcttggaccaagatttggattaatttgtttttgaagttttttgtatataaatatgtaaatacatgctttaatttgcaatttaaaatgaaggggttaaataagttagacatttaaaagaaatgattgttaccataaattagtgctaatgctgaggagaactacagtttttcttttgaatttagtatttgagatgagttgttgggacatgcaaataaaatgaagaatgaaaaaaaaacaatggggcgcggccgaaattttaacactttttggcgggcagatagaaaaaggcggccaagacgcacagggggttcccaaaagcggggccgggtgaaccaggtgggcgggtaaaggcgcan

SEQ ID NO: 14004 - DNA, 922 bp, Homo sapiens
  misc_feature 919, 920, 921, 922: n = A,T,C or G
acgcggggacacacgagggcacacatcagttccaggccccattccattctctgaacatcttctgacacactgacagtgctgagcagagcaaggttgggttcgctcctctggcagaacctcggctctcaggaggtccttgttccagggaacagctgcttctctggggctgggctctactccctgcagcccctcgcactacccagctggaaccagggacaacgcctgagtccaaccctcgtgtctattttccagaaaacgggcaatgctgtgagagccattggaagactgtcctctatggcaatgatctcagggctcagtggcaggaaatcctcaacagggtcaccaaccagcccgctcaatgcagaaaaactagaatctgaagaagatgtgtcccaagctttccttgaggctgttgctgaggaaaagcctcatgtaaaaccctatttctctaagaccattcgcgatttagaagttgtggagggaagtgctgctagatttgactgcaagattgaaggatacccagaccccgaggttgtctggttcaaagatgaccagtcaatcagggagtcccgccacttccagatagactacgatgaggacgggaactgctctttaattattagtgatgtttgcggggatgacgatgccaagtacacctgcaaggctgtcaacagtcttggagaagccacctgacagcagagctcattgtggaaacgatggaggaacggggaaggggaggggaagaggaagagagtgaacaaagcccgagaaaagcagtttctaagcctattaaaaggaccatattctttaaacctcacaaaaaaaaaaaaaaacctcgagggggggccccggtccccactttgccctattggggggccgattaccaattaactggccggccgtttacaccgtctgcacnnnn

SEQ ID NO: 14005 - DNA, 4380 bp, Homo sapiens
  misc_feature 1, 4376, 4377, 4378, 4379, 4380: n = A,T,C or G
nacatctccgggaacccagcccaggccctgcctcccggacacaccgacgctcacgtagtcgcgcttgccacaaccctgcgggctctccgatgcggcgagcgagctggggagggggcttctccgcggcccaaaagcctgttcatctagccccatgatggctgtggacatcgagtacagatacaactgcatggctccttccttgcgccaagagaggtttgcctttaagatctcaccaaagcccagcaaaccactgaggccttgtattcagctgagcagcaagaatgaagccagtggaatggtggccccggctgtccaggagaagaaggtgaaaaagcgggtgtccttcgcagacaaccaggggctggccctgacaatggtcaaagtgttctcggaattcgatgacccgctagatatgccattcaacatcaccgagctcctagacaacattgtgagcttgacgacagcagagagcgagagctttgttctggatttttcccagccctctgcagattacttagactttagaaatcgacttcaggccgaccacgtctgccttgagaactgtgtgctcaaggacaaggccattgcaggcactgcgaaggttcagaacctcgcatttgagaagaccgtgaaaataaggatgacgttcgacacctggaagagctacacagactttccttgtcagtacgtgaaggacacttatgccggttcagacagggacacgttctccttcgacatcagtttgcccgagaagattcagtcttatgaaagaatggagtttgctgtgtactacgagtgcaatggacagacgtactgggacagcaacagaggcaagaactataggatcatccgggctgagttaaaatctacccagggaatgaccaagccccacagtggaccggatttgggaatatcctttgaccagttcggaagccctcggtgttcctatggtctgtttccagagtggccaagttacttaggatatgaaaagctagggccctactactagtgactgcaggtgacagggcgtggcggagctgccacagacaagcctagctctgctcactgtgcagtggagatggaaggccagggaggagcaacgtggaacttccatgaggccccgtttgggaaaataaaaggatcctcttcacttctttcttaaacagcaaatccagccaggttcagattacacaaccagtgtctcactcaaaggagcagtggtggctggcgcgctttcgcactgtggcagccacgagagtctgtgcacgtctgtgctggaaagggtatggatgggaatcaagcctatgccagtgctgatgaagctggaggagtctctcctctgctctccactcagatgtgggacatcagtcgccaaaagccactcagccccagccacctcgcgtgagaccctcactgttcattgtgttcatctttgggtgctctctgccagccaggcctttcctgcaagctgctgtgcttccccgtccacgtgtatctctgctgtgacacactgagctgacgcacatttccagtgcagctgcagaagagaaatgggattggctcttgttttctgcaagttcatgttttgcattttatgttcttccacaattgatctgatgttcaggaaaagataataaaggcaaattagttagtggttgagacaggcatttcctcctcccgcttcttgaccccacagatgtattccagcagagagcaacacaccagtcatcaaaacccactggctcctgtgcggtgtcacagattgcagggttctgacaaggcaggacagtcaagagtggggacactttcagcttctacttttgccttctagggggagctttctaagtccccacatttaccccgagtcaccggaaaaatctgatttttcccccgaaagctcaatgactttaacgtgcttggctggtttgtctcattctttatgaaagaattttggggccgggcgcggtggcttatgcctgtaatcccagcactttgggaggccgaggcaggtggatcacgaggtcaggagatcgagaccatcctggctaacacggtgaaaccctgtctctactaaaaatacaaaaaaattagccaggcgtggtggcgggcgcctgtagtcccagctacttgggaggctgaggcaggagaatggcgggaacctgggaggcggagcttacagtgaaccgagatcacaccactgcattcccgcctgggcagcagagcgagactccgtctcaaacagaaaaaaaaagagaattttgaatctcctttcccaaagagtcatcttttctgctgtgtttaggacatttgatttgcatatccaatatctcctcgaaaccttcagaaaatggttttatcgtgactgtgattcacactatctagaacactttaccagcacccagggacatggacttgggtgttcttatttatggtgtgtatgtaaagagataggggagaaaaacctcacccaagttcttatacgttattttaaacgtttgccaactctgaaatttcagagattcattgttcttaaccatattggactaaagtctgttggttagtgctgttgtaaaagagacctctggggccgagtgtggtggcttatgcctgtaatccctgcactttgggaagccaaggcgggcagctcacctgaggtcaggcgttcaagaccagcctggccaacatggtgaaacctcgtctgtactaaaaatacaaaatttagctgagtgtggtggcaggcgcctgtaatccagctactcgggaggctgaggcaggagaatcacttgaacccaggaggtggaggttgcagtgagccgagatcacgtcactgcatttcagcctgagcgacagagtgaaactgtctcaaaaaagagagacttccgggacagtcattatcagataggccccaaacctgtgatttttcttgggcaagattggtgtttacttaggggtgctttaaaaatatatttttacaagtatacttgtaggaagttggttttttattttctatttttgtttgtttttggagtttggttaaacgactcttttattttctgttttgccttatcttactaaagtgaagttttcctaaggcaagcaagaagaggagtggaagcacagttgcctggatttggaggcagagttgtcaggcttttcaagctaagagtcttgtgcttggattttccagattaatttgaaaagacctcccatttgtggctttgtacataaccaacaggcagatactgagtgccttggctcctagagttttgtggttgggttaggttgtttttgttgttgttttgttttggttttgttttcatttctgaagtttaagatgccttgactttttaaatgctcttaaggctattcgatgtaattcttactcctaaaactggctgttcttagcctgaaatctaatgctttgttttttgtacctctcccaggtgggtaacactctaggatgacatgatgttataattttaggggaaatcacatttttaccttatgctgttactgggcagaaccacgttttatgtaaacataccagacatcgggtaacagacagtactttaaatgttataaatttggtgatcagaactattaatagcataaatcgaactcaaatggaagcaaaactgatttcatgcaggtcctgaattttactttgccttaagaagtgccctccccacaatgcaggagaggcacagagtgcactgtcattgacatgttacccgactaaggatcactctgttcataagaaaaaggcctgaagtgactctgtttaataaagtcagtttaattttatctaataatgatcttaagacattcccatgtcaaaatttgaaatatggtaattcagtgataactatctcttctaaagcagccgtaaaccctccccactacccgtctttctcccagctcaccctggctttttttgctgggggtgctggatgcaagcccccagccagcacacctgggatgctcaccctgccgcacagttcagaaggcaagtcctcacctgctcgcaaagacccttcttctccaataaaagactctacttgcctgagtttcctcatcagggctgtcattcagtgatgtatgggggtctgaagaatactgccttctatctgtcttctgtttaccacttgctcctctgctaccctcctgccgcaaacagtcttcttccttttggcccagttctgtcccgtgaaattctcagaaggcctcgggagctgcgggcaatgtattcccctgttgaaggccacaaagggcaaagcacccctacagggcgcggtttacggagacggtggacggctgaacaagagcacaacaggagggtcaaggagcgaaaagctaaggcacaaaacgtcaggtcnnnnn

SEQ ID NO: 14006 - DNA, 746 bp, Homo sapiens
  misc_feature 746: n = A,T,C or G
gcttcctacttttcaggtttaaatttatcttttttcttctaaaagtatgtttttatcttctaatttccctatcttctctattcttttcttcgccttcccgtacttctgtcttccagttttccacttcaaacttctatcttctccaaattgtttcatcctaccactcccaattaatctttccattttcgtctgcgtttagtaaatgcgttaactaggctttaaatgacgcaattctccctgcgtcatggatttcaaggtcttttaatcaccttcggtttaatctctttttaaaagatcgccttcaaattattttaatcacctacaacttttaaactaaactttaagctgtttaagtcaccttcattttaatctaaaagcattgcccttctattggtattaattcggggctctgtagtcctttctctcaattttcttttaaatacattttttactccatgaagaagcttcatctcaacctccgtcatgttttagaaaccttttatcttttccttcctcatgctactcttctaagtcttcatattttctcttaaaatcttaagctattaaaattacgttaaaaacttaacgctaagcaatatcttagtaacctattgactatattttttaagtagttgtattaatctctatctttcaaagagaaaaaaacttatctgcggtttcctcaagctccgcctgccccctcagcagaagcccctgcgctggctgcctcaatgcctccccgcgtn

SEQ ID NO: 14007 - DNA, 1032 bp, Homo sapiens
acgcggggctctcagaaccttcctgccgtcgcgtttgcacctcgctgctccagcctctggggcgcattccaaccttccagcctgcgacctgcggagaaaaaaattacttattttcttgccccatacataccttgaggcgagcaaaaaaattaaattttaaccatgagggaaatcgtgcacatccaggctggtcagtgtggcaaccagatcggtgccaagttctgggaggtgatcagtgatgaacatggcatcgaccccaccggcacctaccacggggacagcgacctgcagctggaccgcatctctgtgtactacaatgaagccacaggtggcaaatatgttcctcgtgccatcctggtggatctagaacctgggaccatggactctgttcgctcaggtccttttgccagatctttagaaccagacaactttgtatttggtcagtctggggcaggtaacaactgggccaaaggccactacacagagggcgccgagctggttgattctgtcctggatgtggtacggaaggaggcagagagctgtgactgcctgcagggcttccagctgacccactcactgggcgggggcacaggctctggaatgggcactctccttatcagcaaagatccgagaaagaataccctgatcgcatcatgaataccttcagctgtggtgccttcacccaaagtgtctgacaccggggtcgagccctacaatgccaccttctccgtccatcagtgggtagagactactgatgagacctatggcattgacaacgagggctctatgatatctgtaccgactctgaagctgacaacaactaaggggatctgaacacttgtttcagcaaccatagtggggtaccactgctccgttcccggcgggtcatgtgactccgagtggaggacatggtccttccagttcattttatccgggtgccctacacaccggagaccgataagtcaagggcgaagacccaggttagcagaaaaagggggacgcccgcgaacaccggggcgggggcaagggagc

SEQ ID NO: 14008 - DNA, 2009 bp, Homo sapiens
  misc_feature 1, 2, 3, 13, 14, 16, 17: n = A,T,C or G
nnncagtcttatnngnntatgatgtttacagtgggatgttcatatggcctctattttaggttgtttccttctattcccaattgttgagtttttatcatgaaagggcatgacattgtctcaaatgctttttctccatcaatggagatcacatttttttccttcattctattaatgtaatagacattacatttattgacttgagcatgttgaaacatctttgcataccagctgtaaatcttacttggccatgatgtgtaatcctttcaatgtcccactgaatcctgttggccagtattttgttgaatattgatttaaaaaaatcttgatcaggaatactgatgtgtggtgttttttttcttatagtgtctttgtctggttttggtatcagaataatgatggcctcatagaatgcatttggaagtgtcctttcctcttcagttttttggaagagtttgaggagaattgatttaattcttcagatgtttgccagaattcccatatgaccctgggcttttctttcttgggaggcttttctttactacttcatgctcttgactagcataggtctgttcagattttccatttcttcatgattcaatcttgataggctgtgtgtttctaagaatttgtccagttcatctaggttatccaattctttgatatgtaattactcatagtactcttaatcctttttatttctgtaaaatcggttgtaatgtctcctcctggtttttagttgtttttcttagtcactcttagctatcaacaaactcttggtttcatttatttttctctattgcttttctgttctctattttgtctctgctctaatctttattattattataatcatctccattctgctggctttgggttgattgctcttctttttctagttctttcagatgtaaatttagggttgacttgagatcttaatttgtttaataggtgtatttacagttacaaatttccctcctaccactgctttgactgtacctgtttttttgtatattacatttttcatttaccacaagatattttctaatttcccttgtgagttccccattaatctgctggttgagagcgttgtttaattttcacataattgtgtacttttcagttttttgtctgttactgatttctagtttcatcccactgtggcccgaaaagatattttatttcctcagtcttttgaaatttgttgacttgtttagtcatctaacatactgtctatcctagagaaaggtccatttgcacttgagaaaaacgtgtgtactgctgttgtgtctgttaggtccagctggtatgatgctgttcaagttctgtcttgcgactgatcttctgtctggttgtcctatccgttactgaaagtgggctactgcagtctcctactcttactgtagaactatccatttcttcctttgattctgtcaatgtttgtttcatatattttgggctctgatgtttggtgcatatatattacatcttggtgaattttcaaactttttaaatttcaacatgaagatgaaattataggatgtctgggatttcctttgaatccgtggggctgggagtaactataaatgaaacaagattggccgggaatttgaggctgcaaggataggtacacacaggggagtgaagcagggcttggagcagatggtaaagattgttggcttttccagccatggggctctcttgccacttggcagtagtggcatgaagccgccaccagggggccacgcaccagtgcatgtggctgtgttccaaactttttggacaataaaatctgaatttcacatacttttcttatgtcattagatattacccttttacatcttttcactatttaaaaatgtaaaaatcattcttaacatttgggctgtgcaaaaacagctggtgggcccaattttggcctgtatttcacttgccaacccgatttatacttttgtatctatttgacattttccattaaaagttatataacactactttttgtacctgcccgg

SEQ ID NO: 14009 - DNA, 4733 bp, Homo sapiens
acgagccccctccgcaggaggctgagctggagatcccagaggtgatgcctgaggaggaggacgaggacgatgaggatgggggagaggaggcccccgctcctggaggggcgggcaagtctgagggcagcacccctgccgacggccttcccggcgaggctgccgaggacgacctggctggagcacctgccttgtcacaggcctcctcaggtacctgcttccctcggaagaggatcagcagcaagtcattgaaggttggcatgattccagctcccaagagggtgtgtctcatccaggagccaaaagtccatgaaccagttcgaattgcctatgacaggcctcggggtcgtcccatgtccaaaaagaagaaacccaaggacttggacttcgcccagcagaagcctgaccgataagaacctgggcttccagatgctgcagaagatgggctggaaggagggccatggcctgggctccctcggaaagggcatcagggagccggtcagcgtgtacgcagcaggcagcctggggtgggagtgggtggggcctcagtccttccacctgcagcctgccgcttggctccttcacagccaagatggcttacagctggcagttgatttttgttttttaaacagaaggcatcttcagatgagaagctgatcatttacatgtgcaggtgtttacagggttcctttctgtcctggtgtagattttttaaccagcttgttggccctggtcattttggccacatttgtgaccatcataaaagctaagtggtatttctgtgtagtttccgtctggaactgctttcccattcccgggaacccatagccgggccagccagggtcccgaacacaggcccaaagtttattaaaccccgatcataacctccagcaggcatttcatttaatactgagcttagttcctgctgggtaaggcattccgaggtaaccagggccctctgggcaccccctcaaaagccagctcttcgagggtgagtactccttgtttctactgtgagtcgcgtcttgattttccctttctttgatgtctcagtgtgtgtcccaaacacctgcatctcatggactgtttgtgcccatgcccagttcctggcatgccaggccctgggctcaggtgcacaactgactctctttttcactccctaggggaaccccctcggaaggggaagggttgggtgctgacgggcaggagcacaaagaagacacattcgatgtgttccgacagaggatgatgcagatgtacagacacaagcgggccaacaaataggtatgttcacaggccagtgtgtaaggccgtctgccctcgctggcgtgctggtatgcagagaaatttcccccaacaaagttgatgttccctgctcccccaaaaatgccacacacaaaaaaaatcacaaaattctgtgagggaaacaaaagggtctatggatgtggatatgccccattcttaccttccaggtttgctgaaggagcaaacctcacactggccaagggcagatgcgcatggcctgcctggtgccccggctgtgagcccctcaaggcctccaggccagcctccgtggatgtgcgtgtggaaataggccacgcctgtctcttctcttgctcaagttttctctcacagatgacagccacctaccacataacatgaccagcaaacggactgttcctagtccagagggccttgccatcatgcaagtggaagggcgactgtgacagccactgccacagaggatggcagttggctgtgtccctttgtgagggtcttcaaatccttttccttctgcagggccttgggcctgtaaatatcctcatctttctattcttttttttttttagttgccccctcacctaatttccacctcagttttgaacaaaatcgttctcttcctgaatagatcaaaaccactgatgtgaaagataagccttgaagcagcaattgcccttaaaacatcatccctgccctggatcggcctggagccagtgcccaagtacggtttggtgtgtacatgaaaacaaacgtctctgcagtctctggggcggaggtttcgctggcttttctttctctcaaagaaaaaaacatgcaccattttcaatgtgcttttgcctctcctctctgttcacatgcttttagcagcaagtcccctccaaatctgtcttggttccccttcagaaggtggcgctgcccccgaaaggcacctcagcctgtgagtgctgaggaaccagctcctctggctgattttccagttggactggccattgctctccagaagtgctctgttagcaaacgtgatgtggaaacgatcacagatggtgttttctcgttgttcgccagaatttatacgggggagacaaattcccggtaattaccaagtctgcactcgggtaccaaagctctgaagctctctgaacagttgccatacttgagttgatgaatgtgttattcatggtgtctcatctcatcaatgcatcttgagagacttaatgaaattttagcaacagtatagaatagctctatcgggtggggagtaatcattaaacagatgaaatcggccccagatttacatgtctctttagaatccacagtgtaagcaaactacagttacaaagggatgggggttgtaaaccctctgagactctgcacttttcgcacgtatggcatcgtcaagtgctgtcttattacagcctttgtaaggagaggcaggctcctcctggggtgggctctgcagctgctctatttccaggcatgtgatcgcccccgctctccagattccccagcactctgctgcgtgtaactccactcaattctccactcatccttccttgtgaagcaggatcgttgaagttttaagtatgggcaaaaatctggaaaacttaggatccctctgacaccccaggattaggggacacagcagtggctagggcatcagccacagaactgagcgggaaatgccacttgtattggctgtaaagaaatcctggctttgggccaggcacagtggctcaagcctgtaatcccagcactttaggaggttgaggcggatggatcacctgaggtcaggagtttgagaccagcctggccaacatggtgtaaccccgtctctactaaaaatacaaaaaaattagccaggcgtggtagcgggcacctgtaatcccagctactcaggaggctgaggcaggagaatcacttgaaccggggaggcagaggttgcagtgagctgagatcatgccactccactccagcctgggcgacagagcaagactccatctccaaaaaaaaaaaaaaaaaagggccggcagggtgactcacgcctataattccagcactttgggaggccgaggcaggtggatcacgaggtcaagagatcgagaccatcctggccaacatggtgaaaccctgtctctactaaaaatgcaaaaaattagctgggcgtggtggcgggcgcttgtagtcccagctactcaggaggctgaggcaggagaatcacttgaacccgggaggcggaggttgcagtgagccgagattgtgccaccgcactccagcctggcaacagagcgagactctgtctcaaaaaaaaaaaaaggaaatcctggctttctttaagccacagacttcctaggctgtggtcccagctccttgtctgcctggtccctgtcaccttgcagtgccaccacccccaggggctctgcttgcttccagtggcttctgtagctttggcaactggcagatctttatggcagtagaggtgccagcatggaggatggagtttgggtttataacccaaccctcgaacgaaccagcctgtgggggcctggagtggagctggttttggggagtcacaggtgcggggggttcatcatctcctttctccttctcctttcctgacccctccgacagcttccatgttggccatgggtcaggtgaatggatggagctccaagcggggctcagcccattgacccgagcgaggcgcacacacctgcagcgtggatcaagcgcactctctccagcatcgccctgaccattccatgtgctttgtcctagcatgttcattcttgactttctccacttcattttattaaaaagttaaatgctttaggaatctgtggcgtgtggccactgaccgccccccacctcctgccgctcctccaagtttgagctgagatggttctgtgagtccttggcaggggtcaaagggcacatctccttgaacctagaaagccccctacactctcagaggacacctctcctgtggattcagcgctggggcagtgaaggtgtcgggagcccagcagagcatggtgcgtgctgccagctgccggccagccgggatagaggagatgccactggccctccgtgcccccagcccctccctcttaaccgaggctgtcttgctctctgcagaggccgcttctgcaggatcctccgtgtcgccgcgtgatgtgtggtggccaccgggcgtggttcaagcgtcaccgtgtcttttctgtcgttctagttccaggtcaacccccgagaggacaacaggcatctgggaagtgctctctcgccactctgggtgctttactggctctgggttgtttcatcactggaaatccttagagaattgtcgggtttgggcctgataaagcctaaagactttgggctgttcaacacggcgcgctccttgggctcgtttaaagactacacggcgggggtgggaacttagcgcggcaaattgggac

SEQ ID NO: 14010 - DNA, 457 bp, Homo sapiens
  misc_feature 1, 2, 3, 4, 5, 6, 7, 8, 445, 446, 447, 448, 449, 450, 451,452, 453, 454, 455, 456, 457: n = A,T,C or G
nnnnnnnnacaaacattagctattttatgctgcaagaaccaggacacacaattcgccaatcatcccaccatataaccttcgattgtgcttctcaactccaccccataatttctcccagagaccatctatcaccttttccccaaagaagaaacaaaaccagttgcaccttaaaccatggatattttttcctcaggggctttaaatagtttcctatgcaacgtgtcttgtagcacaaataaaattctacaaaagttgcagtaaattttatttggaaaaaaaaaaaaaaaaaaaaaaaaaaaaaaaaaaaaaaaaaaaaaaaaaaaaaaaaaaaaaaaaaaaaaaaaaaaaaaaaaaaaaaaaaaaaaaagggggggggcggttaaattttttaaaaaaaaaacccccccccccccccccggaaccggaaaaaaaaaaggaaggccannnnnnnnnnnnn

SEQ ID NO: 14011 - DNA, 2272 bp, Homo sapiens
  misc_feature 2101, 2105: n = A,T,C or G
cggaatacttctagaattaattaacgcggggggaccatcatgtgacacggaagtagctccggaacaggaagaggacgaaaaaaataaccgtccggcgacgccgagacaaaccggacccgcaaccaccatgaacagcaaaggtcaatatccaacacagccaacctaccctgtgcagcctcctgggaatccagtataccctcagaccttgcatcttcctcaggctccaccctataccgatgctccacctgcctactcagagctctatcgtccgagctttgtgcacccaggggctgccacagtccccaccatgtcagccgcatttcctggagcctctctgtatcttcccatggcccagtctgtggctgttgggcctttaggttccacaatccccatggcttattatccagtcggtcccatctatccacctggctccacagtgctggtggaaggagggtatgatgcaggtgccagatttggagctggggctactgctggcaacattcctcctccacctcctggatgccctcccaatgctgctcagcttgcagtcatgcagggagccaacgtcctcgtaactcagcggaaggggaacttcttcatgggtggttcagatggtggctacaccatctggtgaggaaccaaggccacctttgtgccgggaaagacatcacataccttcagcacttctcacaatgtaactgctttagtcatattaacctgaagttgcagttttagacacatgttgttggggtgtctttctggtgcccaaactttcaggcacttttcaaatttaataaggaaccatgtaatggtagcagtacctccctaaagcattttgaggtaggggaggtatccattcataaaatgaatgtgggtgaagccgccctaaggattttcctttaatttctctggagtaatactgtaccatactggtctttgcttttagtaataaaacatcaaattaggtttggagggaactttgatcttcctaagaattaaagttgccaaattattctgattggtctttaatctcctttaagtctttgatatatattacttgttataaatggaacgcattagttgtctgccttttcctttccatcccttgccccacccatcccatctccaaccctagtcttccatttcctcccgccagtctccattgaatcaatggtgcaggacagaaagccagtcagactaatttccttctttcctcgcacttctccccactcgtcatcttttaactagtgtttcacaaggatcctctgaaaccctctctgtgccccaagtacagatcccattacttctgctttcgtatctcctcaggcaaaagtggagggtgccttatgggccctcctcataggttgtctctgcatacacgaacctaacccaaatttgctttggtgccagaaaaactgagctatgtttgaacaaagatgtcgtgcaaactgtactgtgaacaacagttggtttaaaatatgaggggcaaggaggaggatgcatttcaaaagcttgattgatgtgttcagagctaaattaagaggagttttcagatcaaaaactggttaccattttttgtcagagtgtctgatgcggccactcattcggctccccagaattcctagactgggttaatagggtcatattgtgaatgtctcactacaaaatgacttgagtccagtgaaatctcattagggtttaagaatatttcagggatccttaatgttttgatttttgttttctgaaattggattttattttattttatcttataatttcagttcatctaaattgtgtgttctgtacatgtgatgtttgactgtaccattgactgttatggaagttcagcgttgtatgtctctctctacactgtggtgcacttaacttgtggaatttttatactaaaaatgtagaataaagactattttgaagatttgaataaagtgatgaagttgcattacacctcactgcaaggattctttacttagcttgtttttagatttcttctatatatattttatttatatcccatctaggaattcagctaggtgctgctgctgctctgtttcctttgatgacgctttgaaataaaggcaggagntcanaaaaaaaaaaaaaaaaaaaaaaaaaaaccatgtcggccgcctcggcccagtcgactctagactcgagcaagcttatgcatgcggccgcaattcgagctcacttggccaattcgccctatagtgagtcgtattacaattcactggccgtcgttttacaacgtcgtgac

SEQ ID NO: 14012 - DNA, 2087 bp, Homo sapiens
aaccaggaatcaagtcaggctggttttgttccctgtttctgaaggcagttgaattcagttgtacccctagcaactactaatggttcagccacccgtggagtccagttggggctgagttatgctccactaacccatagcagaccagcaacattctatctttgagctgcttaagaaacacacaaaggataccagccagtggtccaagagcagaccagaatccccacgcagctacacagtaacaagtcccagcaactcctgaagatagatgcggaaagggtgactttaccatggggttcgagtctgagccaagagagttataaaggggtccctaactcattcctttttcaaaataaataaaaaaaggactgtctttcaaacaaaaaccctgcgattttaatgagaattaaaggaggatgtaaattaaaaggcctgtttgtctgtacagcaatgcagatgcgcaggcccatcctggtggaggacccagatgcagggagcaaatattcgggttgtgttgctaagagtcgcaggaactactgctagtgatactaggcttgctgcaggaggatgtcacgctgagaaagggagatgactaggagcagaaaaagtactctcactgttccagcttccagcccaatcctagcagaatgaatgcattttaaaatcagtccacattcacatgtgctgagaaggttgttagtggtccctcatctgggcaaagcagacccaagatggtgctgagtgcagagtgcagagcattcttgtgctctcctctcatggctggaactatctgggctttgcgccctggtccagtgctacgtatcaaccccctcaacatgcctgtggctctgacacggggggatgaattaacttgcctctgttcaaatatacagacttggtgaggctgtcttttgttagtactgatgcacagggacagaaaaagcctgcaactttcagttgggagaatcctataaaagctgtgagcagcaataatttgcagtattgatcataggaagggaaaaaacattctctttcctattagagccccataacagaggtgacatctgtcccaaggccattccatggaaaatggtggctgctggcaattagtgaggctagtccagaagcaagcctccttctgatattggtcactgaaaacagctcactataaacggggtgttttgtggcattcaactctgttgtgctacaaatagagaatgcaaaaagacggtgaaagtaggagtgcataaatagtttttttcatgggtgccagacaggctaaggctttcatataaaaatattcctcactttcctcgtcctgtttaggaagcagtccagttggcataccacgaataggtcacacataggaaatggcctattttgaccaactggatttgtaattttccaaaccggattctgtccagcacttttctacactaatggaaattttcctcctcatgcccagccatctgaaccaaggacaggttccttctcctaagaggacagaggttggattccagaaaaaaatcctggagtcatgccaagagcagagtagcaaagctccctccatccattctccatgtcacgcagactgtattcctaatgaaaaacttcccccactcacacctgtgggatggagtggagcaaagcagttgacgaggaattgaggcaggcgctcctaagatggagggaggcggagagcagggctgtggaaaagaattttccatctgacctgctactttccatagctaatttatacaatattcacaaatcttaatggactttgagtcatttctagaaaagttggacagaaagagccaaagagcagcatgcgtttctctcctataaagacactttcacttccagtttcggaagtccaaatactgaggcacacaccaacggtggacagccctgcaggagcttcctgaaactatctacaattccaagtggatcaccagcttcagaattacacagggatcttatttgggataaagtgttaaaaagtgaatgacaggctttttttttttttttttttttttctgaagtcccttctgtcgtcttctcgcagccgtagtcgacgcggccgcgaa

SEQ ID NO: 14013 - DNA, 1001 bp, Homo sapiens
caattggagctccccgcggtggcggccgcccgggcaggtacgcgggggaggaactgctcagttaggacccagacggaaccatggaagccccagcgcagcttctcttcctcctgctactctggctcccagataccactggagaaatagtgatgacgcagtctccagccaccctgtctgtgtctccaggggaaagagccaccctctcctgcagggccagtcagagtgttggcagcaacttagcctggtatcagcagaaaactggccaggctcccagtctcctcatctttggtgcatccaccagggccactggtatcccagccaggattcactggcggtgggtcagaggacagagttcactctcaccatcagcagtatgcagtctgaagattttgcaatttattcctgtcagcattataataactggcctccgaagtttcaccttcggccaagggaccaaggtggaaatcaaacgaactgtggctgcaccatctgtcttcatcttcccgccatctgatgagcagttgaaatctggaactgcctctgttgtgtgcctgctgaataacttctatcccagagaggccaaagtacagtggaaggtggataccgccctccaatcgggtaactcccaggagagtgtcacagagcaggacagcaagggcagcccctcaagcctcagcagccccctgacgctgggcaaagcagactacgagaaaccccaactctacgcctgcgaagtcacccatcagggcctgagctcgcccgtcacaaagagcttcaacaggggagagtgttaagggggaaaagggcccccccctgctcctcagttccagcctgaccccctcccatcctttggcctctgaccctttttccccagggggcctacccctattggggtcctccaggtcatctttccccccccccccctcctcccccttggctttaattatgctaatgttgggggggaatgaataaataaagtgaatttttgccaaaaaaaaaaa

SEQ ID NO: 14014 - DNA, 3657 bp, Homo sapiens
  misc_feature 1: n = A,T,C or G
nttccaaatcccgggtcgacccacgcgtccggcgccgggacggtgattgccaacgtggccaaagacgcgcgagaggcgggcttcgcgctggacccccggcaggcttcagcctttcgcgtggtgtccaactcggctccacacctagtggacatcaatcccagctctggcctgctggtcaccaagcagaagattgaccgtgatctgctgtgccgccagagccccaagtgcatcatctcgctcgaggtcatgtccagctcaatggaaatctgcgtgataaaggtggagatcaaggacctgaacgacaatgcgcccagtttcccggcagcacggatcgagctggagatctcggaggcagccagccctggcacgcgcatcccgctggacagcgcttacgatccagactcaggaagctttggcgtgcagacttacgagctcacgcccaacgagctgttcggcctggagatcaagacgcgcggcgacggctcccgctttgccgaactcgtggtggaaaagggcctggaccgcgagacgcagtcgcactacagcttccgaatcactgcgctagacggtggcgacccgccgcgcctgggcaccgttggccttagtatcaaggtgaccgactccaatgacaacaacccggtgtttagcgagtccacctacgcggtgagcgtgccagaaaactcgcctcccaacacacccgtcatccgcctcaacgccagcgatccagacgagggcaccaacggccaggtggtctactccttctatggctacgtcaacgaccgcacgcgcgagctctttcagatcgacccgcacagtggcctggtcactgtcactggcgctttagactacgaagaggggcacgtgtacgaactggacgtgcaggctaaggacttggggcccaattccatcccggcacactgcaaggtcaccgtcagcgtgctggacaccaatgacaatccgccggtcatcaacctgctgtcagtcaacagtgagcttgtggaggtcagcgagagcgcccccccgggctacgtgatcgccttggtgcgggtgtctgatcgcgactcaggcctcaatggacgtgtgcagtgccgtttgctgggcaatgtgccctttcgactgcaggaatatgagagcttctccactattctggtggacggacggctggaccgcgagcagcacgaccaatacaacctcacaattcaggcacgcgacggcggcgtgcccatgctgcagagtgccaagtcctttaccgtgctcatcactgacgaaaatgacaaccacccgcacttttccaagccctactaccaggtcattgtgcaggagaacaacacgcctggcgcctatctgctctctgtgtctgctcgcgaccccgacctgggtctcaacggcagtgtctcctaccagatcgtgccgtcgcaggtgcgggacatgcctgtcttcacctatgtctccatcaatcccaactcaggcgacatctacgcgctgcgatcctttaaccacgagcagaccaaggcgttcgaattcaaggtgctggccaaggacggcggccttccctcactgcaaagcaacgctacggtgcgggtcatcatcctcgacgtcaacgacaacaccccggtcatcacagccccacctctgattaacggcactgccgaggtctacataccccgcaactctggcataggctacctggtgactgttgtcaaggcagaagactacgatgagggcgaaaatggccgagtcacctacgacatgaccgagggcgaccgcggcttctttgaaatagaccaggtcaatggcgaagtcagaaccacccgcaccttcggggagagctccaagtcctcctatgagcttatcgtggtggctcacgaccacggcaagacatctctctctgcctctgctctcgtcctaatctacttgtcccctgctctcgatgcccaagagtcaatgggctctgtgaacttgtccttgattttcattattgccctgggctccattgcgggcatcctctttgtaactatgatcttcgtggcaatcaagtgcaagcgagacaacaaagagatccggacctacaactgcagaattgctgagtactcctatgggcatcaaaagaaatcaagcaagaagaaaaaaaacagtaagaatgacatccgcctggtaccccgggatgtggaggagacagacaagatgaacgttgtcagttgctcttccctgacctcctccctcaactattttgactaccaccagcagacgctgcccctgggctgccgccgctctgagagcactttcctgaatgtggagaaccagaatacccgcaacaccagtgctaaccacatctaccatcactctttcaacagccaggggccccagcagcctgacctgattatcaacggtgtgcctctgcctgagactgaaaactattcttttgactccaactacgtgaatagccgagcccatttaatcaagagcagctccaccttcaaggacttagagggcaacagcctgaaggatagtggacatgaggagagtgaccaaactgacagtgagcatgatgtccagcggagcctgtattgtgatactgctgtcaacgatgtgctgaacaccagtgtgacctccatgggatctcagatgcctgatcatgatcagaatgaaggatttcattgccgggaagaatgccggattcttggccactctgacaggtgctggatgccccggaaccccatgcccatccgttccaagtcccctgagcatgtgaggaacatcatcgcgctgtctattgaagctactgctgctgatgtcgaggcttatgacgactgcggccccaccaaacggactttcgcaacctttgggaaagatgtcagcgaccacccggctgaggagaggcctaccctgaaaggcaagaggactgtcgatgtgaccatctgcagccccaaggtcaacagcgttgtccgggaggcaggcaatggctgtgaggcgattagccctgtcacctcccccctccacctcaagagctctctgcccaccaagccttccgtgtcttacaccattgccctggctcccccagcccgtgatctggagcagtatgtcaacaatgtcaacaatggccctactcgtccctctgaagctgagccccgtggagctgatagcgagaaagtcatgcatgaggtcagccccattctgaaggaaggtcgcaacaaagagtcccctggtgtgaagcgtctgaaggatatcgttctctaaaccagtctccaggaagaagagaaagaaaccacactggctagtgaagaagcaggagcttcttgttttaattgctcaccaatggttggttcttgagtggctatatttcagagcttttcctaaatgtattgtttataggtgattatcattctgtgacagtcccttgtttcaacaggcagcaggggtgttcagttggagcaaattagctttggcttgagttgttcatggggccttgatgttggggaaacagagacaaattcagttgtgaaaagtattatgtattaagtgtttgaatttatatatttttctatgtcaaaattataatataaattaccattgtttgtggaggattacatttaaaaaagcaaaaaaaaaaaaaagcggccgcgggcccatcgattttgccacccgggtggggtacca

SEQ ID NO: 14015 - DNA, 1018 bp, Homo sapiens
  misc_feature 1, 2, 1018: n = A,T,C or G
nnccggtacatcgtctaaagtggagcacttacaccaggctctaagattcactttgaggtggaacttaaaaccagtgtactgtatgtatgcattggtaatagctacttttgcttcatagcttcataccaacaaaatatatttattagaatagtatgaaagtactggaggagctgaaagaaaaacacccaaggctgggcgtggtggcacacgcctgtaatcccagcactttgggaggccgaggcaggtggatcacctgaggttgggagttggagaccagcttgaccaacatggagaaaccccgtctctactaaaaatacaaaattggccgggcgtggtggcgcatgcctgtaatcccagctactcgggagggtgaggcaggagaattgcttgaccctgggaggtggaggttgtggtgagctaagatcgtgccattgcactccagccttggcaacaagagcgaaactccgtctcaaaaaaaaaaaataaaacaacacccagatagatacacatactccttcagacttacagacctaagctgcatttatggggtagtgatgaggtttagaacatatacatattttgttaaaattccccagatgattctgggtatgaaatggacaaaaaaaaaaaaaaaaaaaacaaaaaaaaaaaaaaaaaaaaaaagaaaaagaaaaaaagagaaaaaaagaaagaacaaaaaaagagaaaagaaaaaaaaaaaagagggggggggtataaaattagacacgggcgggcgccgcgattaatcgccacacgccactagcccataacaaacggaggcacccccccaagcacgacagtatgaaaaagcacggccgggccgagcatccaaagacgaccggaagggaaacaaaggcgaggaagacataaggaaaaaccccccagtcgggggtagcaagacagacacccacgacgagaaaagacgccgagcagaaaaaacggggggtgaggcagaagcacagtcatgcgcggaagagagagcggacgctagaacaan

SEQ ID NO: 14016 - DNA, 4419 bp, Homo sapiens
  misc_feature 4417, 4418, 4419: n = A,T,C or G
ccacgcgtccggcttggacccccagctgaggagtcctgctcaagacacggtcactggatctgagaaacttcccaggggaccgcattccagagtcagtgactctgtgaagcacccacatctacctcttgccacgttcccacgggcttgggggaaagatggtggggaccaaggcctgggtgttctccttcctggtcctggaagtcacatctgtgttggggagacagacgatgctcacccagtcagtaagaagagtccagcctgggaagaagaaccccagcatctttgccaagcctgccgacaccctggagagccctggtgagtggacaacatggttcaacatcgactacccaggcgggaagggcgactatgagcggctggacgccattcgcttctactatggggaccgtgtatgtgcccgtcccctgcggctagaggctcggaccactgactggacacctgcgggcagcactggccaggtggtccatggtagtccccgtgagggtttctggtgcctcaacagggagcagcggcctggccagaactgctctaattacaccgtacgcttcctctgcccaccaggatccctgcgccgagacacagagcgcatctggagcccatggtctccctggagcaagtgctcagctgcctgtggtcagactggggtccagactcgcacacgcatttgcttggcagagatggtgtcgctgtgcagtgaggccagcgaagagggtcagcactgcatgggccaggactgtacagcctgtgacctgacctgcccaatgggccaggtgaatgctgactgtgatgcctgcatgtgccaggacttcatgcttcatggggctgtctcccttcccggaggtgccccagcctcaggggctgctatctacctcctgaccaagacgccgaagctgctgacccagacagacagtgatgggagattccgaatccctggcttgtgccctgatggcaaaagcatcctgaagatcacaaaggtcaagtttgcccccattgtactcacaatgcccaagactagcctgaaggcagccaccatcaaggcagagtttgtgagggcagagactccatacatggtgatgaaccctgagacaaaagcacggagagctgggcagagcgtgtctctgtgctgtaaggccacagggaagcccaggccagacaagtatttttggtatcataatgacacattgctggatccttccctctacaagcatgagagcaagctggtgctgaggaaactgcagcagcaccaggctggggagtacttttgcaaggcccagagtgatgctggggctgtgaagtccaaggttgcccagctgattgtcacagcatctgatgagactccttgcaacccagttcctgagagctatcttatccggctgccccatgattgctttcagaatgccaccaactccttctactatgacgtgggacgctgccctgttaagacttgtgcagggcagcaggataatgggatcaggtgccgtgatgctgtgcagaactgctgtggcatctccaagacagaggaaagggagatccagtgcagtggctacacgctacccaccaaggtggccaaggagtgcagctgccagcggtgtacggaaactcggagcatcgtgcggggccgtgtcagtgctgctgacaatggggagcccatgcgctttggccatgtgtacatggggaacagccgtgtaagcatgactggctacaagggcactttcaccctccatgtcccccaggacactgagaggctggtgctcacatttgtggacaggctgcagaagtttgtcaacaccaccaaagtgctacctttcaacaagaaggggagtgccgtgttccatgaaatcaagatgcttcgtcggaaagagcccatcactttggaagccatggagaccaacatcatccccctgggggaagtggttggtgaagaccccatggctgaactggagattccatccaggagtttctacaggcagaatggggagccctacataggaaaagtgaaggccagtgtgaccttcctggatccccggaatatttccacagccacagctgcccagactgacctgaacttcatcaatgacgaaggagacactttcccccttcggacgtatggcatgttctctgtggacttcagagatgaggtcacctcagagccacttaatgctggcaaagtgaaggtccaccttgactcgacccaggtcaagatgccagagcacatatccacagtgaaactctggtcactcaatccagacacagggctgtgggaggaggaaggtgatttcaaatttgaaaatcaaaggaggaacaaaagagaagacagaaccttcctggtgggcaacctggagattcgtgagaggaggctctttaacctggatgttcctgaaagcaggcggtgctttgttaaggtgagggcctaccggagtgagaggttcttgcctagtgagcagatccagggggttgtgatctccgtgattaacctggagcctagaactggcttcttgtccaaccctagggcctggggccgctttgacagtgtcatcacaggccccaacggggcctgtgtgcctgccttctgtgatgaccagtcccctgatgcctactctgcctatgtcttggcaagcctggctggggaggaactgcaagcagtggagtcttctcctaaattcaacccaaatgcaattggcgtccctcagccctatctcaacaagctcaactaccgtcggacggaccatgaggatccacgggttaaaaagacagctttccagattagcatggccaagccaaggcccaactcagctgaggagagcaatgggcccatctatgcctttgagaacctccgggcatgtgaagaggcaccacccagtgcagcccacttccggttctaccagattgagggggatcgatatgactacaacacagtccccttcaacgaagatgaccctatgagctggactgaagactatctggcatggtggccaaagccgatggaattcagggcctgctatatcaaggtgaagattgtggggccactggaagtgaatgtgcgatcccgcaacatggggggcactcatcggcggacagtggggaagctgtatggaatccgagatgtgaggagcactcgggacagggaccagcccaatgtctcagctgcctgtctggagttcaagtgcagtgggatgctctatgatcaggaccgtgtggaccgcaccctggtgaaggtcatcccccagggcagctgccgtcgagccagtgtgaaccccatgctgcatgagtacctggtcaaccacttgccacttgcagtcaacaacgacaccagtgagtacaccatgctggcacccttggacccactgggccacaactatggcatctacactgtcactgaccaggaccctcgcacggccaaggagatcgcgctcggccggtgctttgatggcacatccgatggctcctccagaatcatgaagagcaatgtgggagtagccctcaccttcaactgtgtagagaggcaagtaggccgccagagtgccttccagtacctccaaagcaccccagcccagtcccctgctgcaggcactgtccaaggaagagtgccctcgaggaggcagcagcgagcgagcaggggtggccagcgccagagtggagtggtggcctctctgagatttcctagagttgctcaacagcccctgatcaactaagttttgtggtacttcaccctcttctgccctcatttcatgtgacagccattgtgagactgatgcacaaactgtcacttggttaatttaagcacttctgttttcgtgaatttgcttgtttgtttcttcatgcctttacttactttgtcccatgctactgattggcacgtggcccccacaatggcacaataaagcccctttgtgaaactgttctttaaatgaaacacaagaaattggccactggtaaaactctgcagcttcaactgtacttcatttaatgccattaatgcaaatatacttcctcttctttttgcatggttttgcccacctctgcaatagtgataatctgatgctgaagatcaaataaccaatataaagcatatttcttggccttgctccacaggacataggcaagccttgatcatagttcatacatataaatggtggtgaaataaagaaataaaacacaatacttttacttgaaatgtaaataacttatttatttctttgctaaatttggaattctagtgcacattcaaagttaagctattaaatatagggtgatcatagttcctctaccaagtctggaaagaacatctcctggtatccacaattacaccaggttgctaactgtatttgtacatttccctttgcattcgcttttgttcttgctagaaacccagtgtagcccagggcagatgtcaataaannn

SEQ ID NO: 14017 - DNA, 496 bp, Homo sapiens
  misc_feature 492, 493, 494, 495, 496: n = A,T,C or G
gcgtccgggaggtcaacgggctatgctggcttgacagggctgggctcttcagaacagaagcatggatctcggaatccctgacctgctggacgcgtggctggagcccccagaggatatcttctcgacaggatccgtcctggagctgggactccactgcccccctccagaggttccggtaactaggctacaggaacagggactgcaaggctggaagtccggtggggaccgtggctgtatcagtggagcccagcatttatggtgcctgattcctgcatggtcagtgagctgccctttgatgctcatgcccacatcctgcccagagcaggcaccgtagccccagtgccctgtacaaccctgctgccctgtcaaaccctgttcctgaccgatgaggagaagcgtctgctggggcaggaaggggtttccctgccctctcacctgcccctcaccaaggcagaggagagggtcctcaagaaggtcaggaggaaaatccgnnnnn

SEQ ID NO: 14018 - DNA, 964 bp, Homo sapiens
  misc_feature 1, 2, 3, 4, 5, 6, 7, 951, 952, 953, 954, 955, 956, 957, 958,959, 960, 961, 962, 963, 964: n = A,T,C or G
nnnnnnnggcccattcctttaaagttgggcgaccagccacgtgcctctccttttcccccgaaaacgttttttttttgcgcggagagaaggataagccatttattaaccccacgcccctagcaccagctgtcaccttggacttgttggagatgcaggggctagaaaggaaatgacagagtgtacaggccccttcgaccccgtgtcccataggtggtggcccccagacacaccctctctgctggcagtgcagaacatgcatcccaataccctagaggagaaacaccaccccagggagagccctttctgctccaacctcctgggcaggtcccaggttggggcagcagccatctgcaggtgtttgtcaggcctggccacacatgcggacagaggatacgactggggtaccctagggtgtggggagggtcggcctggggtcagggggcatgaaggctgtgttccagactcctcctgcccccaatcctctgtgcccctgctggagctctcctagcttctctgatctgtgctcctgtctttggggagctgcccggtctccaggaagagccagaggttgttgcatttctccgactccactctcgtcaccccgtagctgaccacagagcctgcaaccacggccactaggaggctccactgcaaagggtatggaaacttcctctgaatgaacatctgcaagccaaaggccatgccggtgcctgtgacgaaggtgaaaacgcccttcatgaaggcgtgtgactggcatgcggcatactccccgagtcccgggtgcttggcagccacggcgtcgtccacccgggacagacccaagttcaccatggttggcagctgtccctcctctgggcacacctggctgtggaggagtgagacctgggcgcttggacacgtcccacctcccctatgcccacccggacgccctgagccccttagcaagagagnnnnnnnnnnnnnn

SEQ ID NO: 14019 - DNA, 3072 bp, Homo sapiens
cacgcgtccgcccggccacccccgggcggcttgtagccggtgcgcggggtggctggggctacgtgcagagctgtcgcggagccggaacagcagcggtgaagcccctcggctcggccgagaccgccgtgcccattgctcgcctcggttgccgccgctttagccgcagccgctgctgccgccgccgctttagccgcagccgctgctgccgccgccgggggagaggcagcctattgtctttctccgcggcgaaggtgaggagctgtctcggctcggcccgcgggggagccccgggagccgcacggagatggaggaggacatctggacagtgagcaggaggcgcctcggcccatgccgaacatcccaggggacctggagagccgggaggccatggtggcatttttcaactccgctggagccagtgcccaggaggaacaaagggtgtgctgccagcccctggctcacccagtggcctcgtcccagaagaagccagaggtagcggccccagccccagagagtgggggtgagtctgtgtttggggagacccaccgggccctgcagggggccatggagaagctgcagcgactttatggaaggagaaggtggacctgaaggagcgggtagagaaactagagcttcaattcatccacctctcaggacagacagacaccatagaaagtacatcagccagggggcagtgtcagagacgcagcactgggagaggaggacatcgtcaggctggcccaggaccaggaggagatgaaggtgaacctgcaggagctgcggggcaggtgttgcagcttgtgggcgaccacaaggaggggcatggcaaattttgaccattgcccagaaccctgctgatgagcccactctaggagccccagtagcccaggagcttgggtgtgctgacgagcagggtggcttttatcctaratmaccamtgggattgctgacagatagaggaggtgggaccctgactatcacccctaatctgcagtggattggctctcggcactcccaggctgggagctggatacctgccctggcagcatggctcagactgcatgacagtcacagactcgcctctgctcctgtggtccagtggccggacaccccctgggatggctcaaaggagtcaggacttggaagtggggacatcagggtagctgaaggaaatccacacacccagagcatctcggagttcagactctcagacctgaagtaggcgcccccgggactgggctaggagttggacggaatggaggatggaggacagcgagaagaaaggaagagaaatgcaacgtgtgggcagccgccaagagtgaaaatagagggaagtgtcatgcaagtgctggacagaaggcggcaggtgggacgagccccacagccccctcctcaaaaacgaccacctccaggactcagtgatccctggggggcaggctctgccagccctcggccacacgtggctccggcacccatggtcccagtgccttggatggagacggccagttctggcggccagatgtggtgctctggaatccagtcccatttccttcctggccacgcctgtccagcggcctcttcagccgcattcagcccctacttacctggggaccccggctggggcacgagagcaccaggggggtagggcccaaagggatcaggggaagcctctggcctggagggtatggggcacgcttccccaagggcggacccggcaggaggaagcccaggagctgggtcctgccgcccaggagctgggccctgccacccaggccgggctagggacatggcagggcctgggcatcctgacgctggacttgggcgacctgggaggcacagggaggggagagatgggcgaccccgccccagcgcagtgccggccacaccccaaggcggttgccagagcttaagccccgcccccagcagcgagaacatcccagctccacacccccccccccccccgcagccagtgctccttgtcaagctccccccgtcactccaggtgggagccaccccggtgagggggtgtgccacttgcccccagggcactcctctgggcatcccgggtgggggattttggggccgtggggggcagtctttggtacctgtgttcgtcagggatgctctgacaaccaggtgtcgtccacgggcgggggcatgggcatggtgacagtggtcctgttgatgtcaccgatgatgctgagcgcctccttcagcgcgtggtgcatgtgcagcatctcgtcgtgctgctgtgcctgctctgccaactcctccatcagtgtgttctggttcccacatgagtacatattggccagcggctccgagatgatgaactccggggtctgagagtgggcaaacagggaagaaggttgggacctggtgcctgtgccgccctggctgccttgctgggcccttctgggactgtgcgctggacttggagccccttggagtatggcttttcacacgggcttctataccgcttcgactggaagatccacctccccactgccttttctcactcagatggggacaccgaggtccagaggaaaagacacctgtcaaatgtcacagatctgggaggggacttaagacctatcatgccaagaggacacctgtctactcagttttttttttggtggggcggggggcggtgatagggtctcgctctgtcaccaggctggagtacagtgatgactgctcactgcagcctccacctcctgggctcaaagtgatcctccaacgtcagctctctcgagtagctaggactacaggcacatgccaccaccaagcccagctatttttaaaatttttgtgtggagacaaggtctcactatgtggcccaggctggtctcgaactcctgggctcaagtgatcctcctgcctcggcctccaggagtgggagttggagttgatgcctggatacaggagctctgtgggtgggagtgagacaaaacacagggtcctgagctctgggggaccaagcaatgtcctctggtgaaaaaaatcctggacttgctggcagaagatttgcctcttactcgccatgtgctctgaatacatttacctgccctc

SEQ ID NO: 14020 - DNA, 7772 bp, Homo sapiens
atgtcacaacgggaagtggaggccattactgaaggtgtagaggaagatgaaggattttgctgttgtgaacctggccatattcctcacatgctttcatttaatgctgcatttagccagcgatggctagcttgggaagtgatagtcacaaagtacattctggagggttatagcatcactgataacagtgctgcttctatgcttcaagtctttgatcttcggaaagtactcaccacttactatgtcaagggtatcatttattatgttacgacctcgtctaagctagaggagtggctagctaatgagacaatgcaggaaggacttcgtctgtgtgctgatcgcaattatgtcgatgtggacccgacctttaatccaaacattgatgaagactatgaccaccgactggcaggcatatctagggagagtttctgtgtgatttacctcaactggatagagtactgctcttcccgaagagcaaagcctgtggatgtggacaaagattcatccctagtgactctctgttatggactctgtgttctgggacggagagctttggggactgcatcccatcatatgtccagtaatttagagtcattcctctatggattgcatgccctatttaaaggagatttccgtatttcttcaattcgagatgaatggatctttgctgacatggaattgctaagaaaagtagtagtccctgggatccgtatgtccattaaacttcatcaggatcattttacttctccagatgaatatgatgaccctactgtgctctatgaagccatagtatctcatgagaagaacctcgtaatagcccatgaaggggaccctgcatggcggagtgcagtacttgccaactctccctccttgcttgctctgcggcatgtcatggatgatggcaccaatgaatataaaatcatcatgctcaacagacgctacctgagcttcagggtcattaaagtgaataaggaatgtgtccgaggtctttgggcagggcaacagcaggagcttgtttttctacgtaaccgtaacccagagagaggtagcatccaaaatgcaaagcaagccctgagaaacatgataaactcatcttgtgatcaacctattggctacccaatctttgtctcacccctgacaacttcttactctgacagccacgaacagcttaaagacattcttgggggtcctatcagcttgggaaatatcaggaacttcatagtgtcaacctggcacaggcttaggaaaggttgcggagctggatgtaacagtggtggcaatattgaagattctgatactggaggtgggacttcctgcactggtaacaatgcaacaactgccaacaatccccacagcaacgtgacccagggaagcattggaaatcctgggcagggatcaggaactggactccacccacctgtcacatcttatcctccaacactaggcactagccacagctctcactctgtgcagtcgggcctggtcagacagtctcctgcccgggcctcagtagccagccagtcttcctactgctatagcagccggcattcatccctccggatgtccaccactgggtttgtgccttgtcggcgctcttctactagtcagatatcgcttcgaaacttgccatcatccatccaatcccgactgtcgatggtgaaccaaatggaaccctcaggtcagagcggcctggcctgtgtgcagcacggcctgccttcctccagcagctccagccaaagcatcccagcctgcaaacatcacactctcgtgggctttcttgcgacagagggaggtcagagcagtgccactgatgcacagccaggcaacaccttaagtcctgccaacaattcacactccagaaaggcagaagtgatttacagagtccaaattgtggatcccagtcaaattctggaagggatcaacctgtctaaaaggaaagagctacagtggcctgatgaaggaatccggttaaaagctgggagaaatagctggaaagactggagtccgcaggagggcatggaaggccatgtgattcaccgatgggtgccttgcagcagagatccaggtaccagatcccacatcgacaaggcagtgcttctggtccagattgatgataaatatgtgactgtaattgaaactggggtactagaacttggggctgaagtgtgagccagtgtttattataaagacatttctttttccctctcaattccaaggcattggaaaaagagaggaacaagcagaagatgcctgcaggtatcactttgatcctatgtgggagcgactgaaaatagaatgagcttggttaagcacctctcctttgcccttcaccctgactcctgtcactgtctccatccccaaataaagctgaaatatttttttaagttagctgccgagaaaacattttgcatgaaggataaagttctgttaaaatacatccttaaaaaaagtttttcctatgcattgcctatgctttaaatcaacaaactcttcatttctaaactatgatctcatatttttctaatttctttgccaaaaataattgccatgttttgtcatagaacatgaaattcatttaccttgatttttaagaacagaccagtgtagaaatgttccttttgacttatagcagtataaaagtttaatgtacagtgaaagagactatgaacagacatagatttatcttattccttgagcgctaaaaactttaataaaaaaaactgcactaattttttacagcaatgcactaaagtctgagatttctcagaacatttatttatatataaaaataaaataccattatttaaattgcctttgggattagccccttccctttccttataaacacaggtagcaggaactgtgctgctcatttttctgttagtagtgtgtacttcatgccaggacattgggtattttctttaaagtgaatatagaatctcaagatatacgtagcttcatcattgacatttcccagagccaatagtcagcggatcggtcttgtgaacaccactgccagctcctgcgtctacatctcagaggagcccatgtgctctgcttctctccaccagagcaagctctgctgggcgtgcttctgggaagaaaacaattttctttaagaagaagatgaatgtccaggaatttaaagaaaggatcgattgccttttatttatgagtttctagctcttgaagttattcacatgcagttcagttagtcaagtaaaattttttttcaaataaaagtatccaagtggtgcagttattattatatccctctttaataattttgctttttatttttcccctcttctttttctgttacttgaattttatttcctgtaatttatagtgtgtagctgtaaattgaaatatttataactgtgaaattgacttaattcatatgttgtctcataactttattttttttaaatgcatattcagggaaatatattactcatatttacaattgggcgatataggaacttcaatttagatttaatttgcaactcttagcattttttaaatccttgataaaattttcccttttggtgtgaaactccaaagaaaattgtacatctcctctgagcatttaggagcagccatctttctaccccttgtgaataaatcattgaaagaaacaggtaaaattaattttaatgatacattttgtttcacccagtatagtcaaagtattactatttcatcatatgtcactagccatatttcaagtactcaatagctacatgtacctagtggctactgtattagacagtacagatttaaagtatcttttgttgaggtgacagaagagagaagctgtttttcctaccaattctgatgtagatctcacattatagcataacattacagtagaaggaatgaaaactaagaaagtaaatagtgaacatacagaacttactgcatttccactttaaaacctatttattttccctttttctaattttaaacttttgtggtcattcagaacctaatgtgccttgtgttgacatttccatagacttcacactttacaaaatttactgtttaaaaatacttgtcaaatgatttactgaacctttatacaaaagtaccctttctaaattgaccatttaaaaatgtatttttgtgataccgtcattatgttctgcatttgcctcattttggcagatctacagtatgccattaaagtttagtgttgtttttggttttggagggtttttttctgaaactgaatttataatctatttctctgtatacatatatttttaaaatcttctgaaaggaactatgttccctgctgcttcttccctttctgaagtgaatatgatcttttcatggtcattgcctagataaaagtagagccttttcaatcttagatggaagataattcattttcccacacagaaaaaaaatctgacctttacatgatttaatctgaagggctagaattttttaatttctagcccctcctccaaaaaaattttaaacacatcacatactctgaaaagtcagatttcaaatgcaagactagactttatatggaacatatatgttgggttttgattttgggtagcaattgacatatatttttctcaaaacaagttgaattttgttaacatatataattctttagtgaatttataaattaggaaccctgagaagaagccctgttgtttttcttaagagtctaaaactgacaatcttttaaaaatcataatacttttctagtaattgcatcagggaattggtgataattgaagaaagatccatttcttaagaataatttgatctaaattattatatggaaataaacatacttgtgttaactaaattgatcataaattcttgttcctgcctcacccctcaccccccagagaatagtgagtgactcatttagattctctgctttttttcagttatgtacaagacttcagcatacattaatgtctttagttataaatttgccaatgctttaatttccataatttgaaagttaaaagatgtaactaaaatactagcttttttattcatttccttttggtggagttgtatgattgaaaactttgctttttcttgtttaattcttccgccaccccctcttttgagagaaaggtaatcgtggaatgagttataaattattgcctttttttcctttatttctttcattcagtggcaaaaaacattttataactcctaagtttttggttaatcttccaacttataccttggtgtgaactctctttttacaccattttcaacactggataaaactttaatgttgactttttgctaaagaactttaatttttccaagaatctagattaacataagatgttgatatttaaggaacttggaagagtaagtggtgaggctgtatgtatattttttaagagattaccttttaggaaattagtgaacaaacttaaccagtgttctgccttctttgactttgttactggaggatgataatctatttctattagattcgaagtattttggaaaatatttcaagtatatctgaactacttataattcttaaaacagaagtagtcagacaatatttgtatcctaagtgagatatggaaaattactctgtatactaaatgtcaggcaatgaaaatgtaagtttttgtgtagaaaacccattaagaagatgtgtttttctttctgaattagtttatttttccatcacataccaaaatataaaaatcagcctcacatttttcagcaagtttagcttatagccttgataaattcctctgtgcttctgagcagcatccttctgcctctgcttagcagctctgcatttggtggattgctgttgtgagtcattcatccagcactgggccttttaagctgaagattcacccagtgtctaaagttgtccttttcttatagctagctttcaagcatctttcctcctaaataaatatgtgacttgagaaaaaggtaataatgattttgtcagaattctttgaatttatatttactagctacttaaccataaactgctgtccagattgttaatttcatttatatttattttaattaatttgtcatgaatatggacaaagccttttctggggtgtgtgtgtgtgtgtatgtttgttttttaagtcgtcattattcattcgtattctttttctgtgtaatgtaatcatataaagttactttggacagagacccagttaattttctcttttgataggatacatggtttagataaggtataaagtgtccctttttattctagaggcttttcctttaattcagagattagtggagataataacgtcagtcaaggctaatgtggtacatggaacttgctaatggaggttggacattctgtttcagtcttacatggatattgtttcattggtgttgaggaagaaaaaaattagatactaccatgcattgggacagcataattctaatattacattgaatatggctttttaaaaataagtattaaaaagccaatcgttttctccatttatctatcttttttgtttgtttttaatttggttgattgatatgcacccaggccgtcttatttttacttgttaaatgtctgtctaggaagaactgtgattggaaaggaattaattattatacaaataaatctggtaggatatgagtggagtaagtttgcttgaaacagaagtatattttctactttgaatcacctcaccagagtcatctgtcaagaattatgtataacaatttatctttattgcctacatacaacatactttttctgaattaagataacttctatttgtgagttgaacttcattatctgccattttgtggaatcaaccttacattctttggtggaactagagctgattgtcaccacaagggtatatgacaactctgttctaagacttatacctattatatagggttatacctttttttcttatgcctcagctctgtacctgacaatttatgattcagtggagccaagctagaaggaacaaaggtcatctaacactgtgatggggatgaattcctgagttttacctgcacaatgaggtggtgccccggaattcacaacagagtagtgatagagcataagatggctgctccagatgactcttgggtttagtgtacttgtgattgaacaagattttttatctatgaagcttgattctacaaccaaaataatagaaatgggggggggggggggaatcatgtctgcttatgctttttaaaagcttatagtttaagtaaaagtaaaatgtaaaaactgattaaacctatacaagtctggcaatgagctctgcatgaggaaatggaaggaggaatattgaaaatgattctaggaaagtgaacgtaagaaaggaaaatgggttttccttttctgatcatgggctctggaaagtattcatggcctttaccagcattcagtataaaccagagataaggacatatgtacttacgtgtgtctgtgagtgtgtgtgtgtctgagtgttattctgaacagcttgtaaatattgtagttgtttaaaatggaaaataaaagctgagttcttttggcaaatatattgcatcaaaaatacagtattgacagtggataaaacactgaggaaataaattttttttcattttgaaaaaaaaaaaagaagaactcgagggggggcccgttacccaatctcccctatagtgagttgtgttacaatctactggccggccttttacaatgtcgtggctgggaaaacattgtcgttacccaacttaagcaccttgctttacataccccttttgtcaag

SEQ ID NO: 14021 - DNA, 931 bp, Homo sapiens
ccctttgtagggacgcgcgccattgtgttggtacccgggaattcggccattatggccgggggagaacatggacgttaatatcgccccactccgcgcctgggacgatttcttcccgggttccgatcgctttgcccggccggacttcagggacatttccaaatggaacaaccgcgtagtgagcaacctgctctattaccagaccaactacctggtggtggctgccatgatgatttccattgtggggtttctgagtcccttcaacatgatcctgggaggaatcgtggtggtgctggtgttcacagggtttgtgtgggcagcccacaataaagacgtccttcgccggatgaagaagcgctagccccacgacgttcgttatggtggtcatgttggcgagctatttccttatctccatgtttggaggagtcatggtcttgtgtttggcattacttttcctttgctgtggatgtttatccatgcatcgttgagacttcggaacctcaagaacaaactggagaatacaattgccaaggaatcaggttgaagaggacaccgatgggcattggtcctgggatgccctagaacagccggcacacaaggcctcaccagatcacttgacttattattcagcaaagtgaaaggaataaacataatttacctgaagctagggttgcagcagacatgagttgcagcttgccttgtccagactatgttctgcttgcgtttgaacaggacgtgcccgtacaccaatattatgggctgcatgtataggcggacatatagtcggggtcgaaaggaaactcgaaacgaagaacccacttcttggttgagtccccgtttttgaccacggagcgacacgattcggaaaaaaaacatgtgccccgttctgcaaacggtcgccaactctggattgtggcccagagggaaaaacccc

SEQ ID NO: 14022 - DNA, 2727 bp, Homo sapiens
  misc_feature 1, 2, 2719, 2720, 2721, 2722, 2723, 2724, 2725, 2726, 2727: n = A,T,C or G
nncacgagcttgctcgcggagagaggagctaggagcctcggccaatgggagccggcgttgttggaggccacggcggcgcagccccaaagcgagcgttgttggaggccacggcggcgcagccccaaagcgagcgaagctagggtcgccgccactgccgcaggaggcgtgaggggataaaaacattcagatggcagatcacagtttttcagatggggttccttcagattccgtggaagctgctaaaaatgcaagtaacacagaaaagctcacagatcaggtgatgcagaatcctcgagttctggcagctttacaggagcgacttgacaatgtccctcacaccccttccagctacatcgaaactttacctaaagcagtaaaaagaagaattaatgcattgaaacaacttcaggtgagatgtgctcacatagaagccaagttctatgaagaggtacatgacttggaaagaaagtatgcagcgctataccagcctctctttgacaagagaagagaatttatcaccggcgatgttgaaccaacagatgcggaatcggaatggcacagtgaaaatgaagaggaagagaaattggctggagacatgaaaagtaaagtagtcgtcacagaaaaagcagcggcaacggctgaagagccagatcccaaaggaattccagagttctggtttaccatcttcagaaatgtggacatgctgagtgaattagtccaggaatatgatgaaccaatcttgaaacacctgcaggatattaaagtgaaattttctgaccctggacagcctatgtcttttgtgttagagttccactttgaacccaacgactactttaccaactcagtcctgacaaaaacctacaagatgaaatcagaaccagataaggctgatcccttttcctttgaaggtcctgagattgtggactgtgacgggtgtactattgactggaagaaaggaaagaatgttactgtcaaaaccatcaagaaaaagcagaagcataagggtcgaggcactgttagaacaattacgaaacaagtacccaatgagtcctttttcaacttcttcaatccattgaaagcatccggggatggagaatcactggatgaagattctgaattcacattagcctctgattttgaaattggacactttttccgtgagcggatagtcccgcgggctgtgctgtacttcactggggaggccatagaagatgatgacaattttgaagaaggtgaagaaggagaagaggaggaattagaaggtgacgaggagggagaagacgaggatgatgcggaaattaaccccaaggtgtaatttttgtctgttaatcattcatacgtttctagaaggaacccagccagccggcggaatgcaagcagcagtaggaagcggaggcgggtgcctggcagaccggctgtcgggactccaggcctgtgggcggggcctcggtccttgccgcagcacaatcccgtggacagagcttactccatctaactcgttttcaagtgcatgattttcactttcacttttcctttttccttattattttgcttaacttgtacagtggcaactgaaatgcatttcagaaataggaggtttcgtccagcaccctctgcagccttggtgcctgtagctctggacttccctgggcctttccctgtgggagggccctgtagaccacatcagggtggggtgggggtcacttggcaaaaagggccgaggtctggtgatgtggttcccaggatctggaacctctcccacccctcctgcagttggactgaattcttccctttcatccgaagaaacccacttgctgtttccagccgctgaatctgctgagtgtgcagcctgcatcacctgctgtatgccgatcatctcagaaagggctgtgtagagtagggccctgttctccttaggatgttgcttcttgatttttttttttttttaggggtgggtcagggttgtgacacaccagcccaggtgagagctgctgcgggtcacctcatatttatttatcccttcttgcctgtgaggactgcggcttttcgctgtggctcgtccttaacgtttctgaaccaccttggtgccctgagcaggaagatgtgccacttcctagcaggcgcaaggcctgtgcggaagaaacgccgctccctgccaccagggctgaagatgcgagcccgtcctcatgacgcaggcgccaccctgctgccggagccgggcttcggcagtcttctccactgagggactgggctgggaagtcctgcgtttcagtggagcgtatgagcgtcaagtcctgctttctcagtagccccattgcggggccccaccattcatcctgtctgaaggtcctgggtttggtgtgaccgcttggcggctggtgggtggggttttcaagtgggtgacggcgctctccggcagccggggatggccgtgtccgcactgaccaggcctgtggagagtgctcggcctaaccttagaacacatttgtaactgaatacagtgttttcaatttgtacagaatagttagaatattctattaaagtggtgaaacattgaaaaaaaaaaagggggggccttaaattctcaagggcccagtccgtcaccgtttcttaaggccctaagagggtataaaagacggcggtaacctgcggacgtctcgcctcgggaccctctggtggatgcaccagaaggcgataaatgttgtcccatcgtgatggnnnnnnnnn

SEQ ID NO: 14023 - DNA, 1031 bp, Homo sapiens
  misc_feature 1031: n = A,T,C or G
tctagctagagggtttaactcctatttaaaaagaagaacctttgaattctaacggctgagctcggaagacttgggtccttgggtcgcaggtgggagccgacgggcatcatggaccgatctaaagaaaactgcatttcaggacctgttaaggctacagctccagtgtaggtgaggtcacaaaacgtgttctcgtgactcagcaaattccttgtcagaatccattacctgtaaatagtggccaggctcagcgggtcttgtgtccttcaaattcttcccagcgcgttcctttgcaagcacaaaagcttgtctccagtcacaagccggttcagaatcagaagcagaagcaattgcaggcaaccagtgtacctcatcctgtctccaggccactgaataacacccaaaagagcaagcagcccctgccatcggcacctgaaaataatcctgaggaggaactggcatcaaaaacagaaaaatgaagaatcaaaaaagaggcagtgggcttggaagactttgaaatggtcgccctctgggtaaaggaaagttggtaatgtttattggcaagagaaaagcaaagcaagtttattctggctcttaaagtgttatttaaagctcagctggagaaagccggagtggagcatcagctcagaagagaagtagaaatacagtcccacttcggatcctaatattcttagactgtatggttatttccatgatgctaccagagtctaactaattctgggaatatgccccacctgggacagtttatagagaacctcgaaactttcaagttcgctgagcagagaactgctacttatttacagaatggaatgtccgtttactgcatcgaaagtttctgaactaggcaaatatttgggtcgtggagctaatgcacttgcgggcaattcactctccggaccctctggccgaactgccgaatgagtcataaaggccgccggcacaaagcgccctgaccacgcacaatggatcttgcggctagaaccaatccctgagctgtgtgttttctctgctcn

SEQ ID NO: 14024 - DNA, 1223 bp, Homo sapiens
actataggagtcgacccacgcgtccggtgggtgggaaagcatgggtgatagttccatgatactggctgagtttgcaatagcaggtggaaccctaactattgagggagtttgcagatacctcaggattcgtgacaatgcctttaaagatccaggagagatgttcagctactaggaactgctagcaagtatagcgcgaatggctccgagctcagacactctacagctgagagtagacacttgtggtatgtggagtacagataagccaggggcaggccacggcacgctccatgaaagctaggagggagtgaaatatcagtgatcatcgcaaggaaggaggcagacaagagtaaggcacacctgactcttaggactagcagtcagaaccaggaggaaaggttttattgctatgcgggtaggtaagaacagattttacttacatccatatagttacttaaagtccagttttctgttaaacatttttcttaatatattgagccaaaactagtccagttaagctgaacttggtttttctggagatgaattgttttaaattgacaccctattgatggctcccagttgaaggaagtgagcacattatttgtactgtgaatataaatttttgcccttttatttatcttcctttgacccatttccttaaaataatggctcaaagtaatagacttcccctaatggtggggggatgggtgggttattaatggaaccattgaaaaatttgagaaggaggctgctgagatgggaaagggctccttcaagtatgcctgggtcttggataaactgaaagctgagcgtgaacgtggtatcaccattgatatctccttgtggaaatttgagaccagcaagtactatgtgactatcattgatgccccaggacacagagactttatcaaaaacatgattacagggacatctcaggctgactgtgctgtcctgattgttgctgctggtgttggtgaatttgaagctggtatctccaagaatgggcagacccgagagcatgcccttctggcttacacactgggtgtgaaacaactaattgtcggtgttaacaaaatggattccactgagccaccctacagccagaagagatatgagggaaattgtaaggaagtcagcacttacattaagaaaattggctacaaccgcaacacagtatcaattgtgccaatttctggttggaatggtgacaacatgctggaaccaag

SEQ ID NO: 14025 - DNA, 398 bp, Homo sapiens
  misc_feature 1, 2, 3, 4, 5, 6, 7, 8, 9, 10, 11: n = A,T,C or G
nnnnnnnnnnncggagtacttctagaattaattaacgcggggcgatggagcgaaaagtggaaggaggtgaggaaactgaagtcccgggagagacagtggcaaggtcaagtagcaaagtgcactcagccctcccagcaaggagtctgccactcgcgcttgaaggacgtgtttgaagagctgctttcccagtgggatgctgccttaaagtcttgattccctggcactctttcctattactgcattttatcggtgctgtttgtgttatgcaacggtagcatcgtgtctccggaagataaaaaaggtctcgatacaaacatccataaccttccacccactccgtcaggaacaacccaatcaaaataaagtcatgagaatttaaaaacaaaaaaaaaaaaaaa

SEQ ID NO: 14026 - DNA, 1072 bp, Homo sapiens
acagagtcttttgcttcctcccacccctagggggaaaaactgctttgtgctttgggaagttgtctctgaaacccggggacagaggacgcaggacagactaggagggagccgggagaatgggctgcagctgtggaggagggtttcagaggagagaggtcggagagcaaaggcctgagaagccagaggcaggtggagagagggtggaaagtgagcagcgggctgggctggagccgcacacgctctcctcccatgttaaatagcacctttagaaaaattcacaagtccccatccacaaaaaaaaaaaaaagaaaaatatcaaggaataaaaatagactttgaacaaaaaggaacatttgctggcctgggggggcatctcaatttctatagcaccagtgattccctccccaccccacccatcacatagatgtagcacctttggtataaaatggggagggaatcactggtgctatagaaattgagatgcccccccaggccagcaaatgttcctttttgttcaaagtctatttttattccttgatatttttctttttttttttttttgtggatggggacttgtgaatttttctaaaggtgctatttaacatgggaggagagcgtgtgcggctccagcccagcccgctgctcactttccaccctctctccacctgcctctggcttctcaggcctctgctctccgacctctctcctctgaaaccctcctccacagctgcagcccatcctcccggctccctcctagtctgtcctgcgtcctctgtccccgggtttcagagacaacttcccaaagcacaaagcagtttttccccctaggggtgggaggaagcaaaagactctgtacctcggccgaggtaccgctttgtaggggagggaggagtaaggatgtcagagacctgtgtccaggtgcaccgatgccagacagacgctcccatgtggctgaatgggacccaccatgccataggggatggcatcaccacccacactgcctgtgcccattggagtggcaaatgctgtttctggaaaacagaggtgctggtgaaggcctgcccaggcgggt

SEQ ID NO: 14027 - DNA, 749 bp, Homo sapiens
acacgaagaaagtcctcttgctggagtcgctgctctgggccttgcgaacaccctcttcgtgcgccgtaatggcgttcttggcgtcgggaccctacctgacccatcagcaaaaggtgttgcggctttataagcgggcgctacgccacctcgagtcgtggtgcgtccagagagacaaataccgatactttgcttgtttgatgagagcccggtttgaagaacataagaatgaaaaggatatggcgaaggccacccagctgctgaaggaggccgaggaagaattctggtaccgtcagcatcccacagccatacatcttccctgatctcctgggggcacctccttatgagagatcacgatgtgctacaaaggtcccagaatggttgctcagatgacgtgcatccttccgtgagaagggcatttgtatccgtgattacttgtggcaagagacgacaccggtgggcgacaaaactggcgagaggggacagctggcaacgagagggtaacggaggctgaaggaggaaaaggccacctgggtgggtcctttaacttgaagtcttgggccccgtgcccgaaaaggaaagggtgatttgcccccattgtgggggtatatgtgtgacaagaccctgggaggggccattgttcgacggagagagacctcatcttcatgctggccaggttgacatttggtccagaacatgacttgggcctataacaattagtgaaggggccaaccaaaacataagcaccaaca

SEQ ID NO: 14028 - DNA, 433 bp, Homo sapiens
gcgtccggctgaaacttaaaggaattgacggaagggcaccaccaggagtggagcctgcggcttaatttgacccaacacgggaaaccccacccgtcggcagagcaaccccacctccaggcattatggctcctccacctggtatgagaccacccatgggcccaccaattgggcttcccctgtcgagggacgccaataggcatgccgcctccgggaatgagaccccctccaccaggcattagaggtccacctcccccaggaatgcgtccaccaagaccttagcatactgttgatccatctcagtcactttttcccctgcaatgcgtcttgtgaaattgtgtagagtgtttgtgagctttttgttccctcattctgcattaataatagctaataataaatgcatagagcaattaaactgtgaaaaaaaaaaaaaaaa

SEQ ID NO: 14029 - DNA, 664 bp, Homo sapiens
cacgcgtccgccctagagctttgctttttctctcctgcagcacttaaccgaaaccagttttgcaatcaattcctgttcaaaggccaccctactcttcctatccgtctttctccagcccagacactcacagccccctgccagaccaggggacctcggagaggcaaggacagaggttcaggatcttcctctccctcgggacccaaggccacaaaggagagctccgtggagagaagaaaatcatttgactcctggggacacagatttgctgccacagaggctgatggacaaccaggcggagagagaaagtgaggctggtgttggtttgcaaagggatgaggatgacgctcctctgtgtgaagacgtggagctacaagacggagatctgtcccccgaagaaaaaatatttttgagagaatttcccagattgaaagaagatctgaaagggaacattgacaagctccgtgccctcgcagacgatattgacaaaacccacaagtatcactaagctcgctttcttgctgtccaatttctattaaaggctcctttgttccctaagtccaactactaaactgggggatattatgaagggccttgagcatctggattctgcctaataaaaaacatttattttcattgcaaaaaaaaaaaaaaaaaactacaaggg

SEQ ID NO: 14030 - DNA, 666 bp, Homo sapiens
cgacccacgcgtccgccaaagcaaacaaaagagacaacttttttaaggtttaaaaaagaaaatgtaaagaaaaaaaaattcccttttcgtttctaccaaaatgtttgttgactgacctaaattggggggtggggggaagcgaacaacaacaacaacaacaaaaaacaccctgattctgcccaccttgtttcgcgtttccggtttgatgatcccttgttcttaacgtaacacagtaaaactgtgttatgaagtgtgcgaacgtgtgtgtccgggatgtcgctgtgtttcccccccacctctgccccttgcaggttgcccgctgagtgcgtgctggcgtgcgctggcgtgcgcaccgtctagttcatgtttacgagctgtaaataccatttttatactccacacgagagaccctatgtgatttgtacaacgggcttaatttctgctacaatgaatttcgtgaaatttcaaacttcaaacaattttgaagacgagcagagagagaaggccgagggtggagagggaatgtggggtttgagtccccgtacctcctgtttgtgtgcgaagtagcgagcttctcaacggcaaatcacctctccttggtctggaaaagaaaaacgaaaaacaaaaacctaaaagtttatttaataaaagttttacttgttaacc

SEQ ID NO: 14031 - DNA, 711 bp, Homo sapiens
  misc_feature 1, 2, 3, 4, 5, 6, 711: n = A,T,C or G
nnnnnnatatgtagcattatttataatagtgaatgattggagacaaatttgcatcaataggtgaatcattaaattgtgatacaaccataccatgaaatgttatgcagtcattttttaaatgaggtaaatttccatgtattaatgcaagaggaggtccagaatacaatgcaaagtgaaaaaagttgcaaaacagtacatataatatcccatttcatttaaaaaaaacctatatacaaatgtgtgggtattcatatatgtatatatgtgtatattaatatataaacacaaacagaacaacatctgggaagacacacaccaaattaagttattcttggagaatgggagtggtgagagggactaaggaaaaatctttcactttttactttacacatttatgttttgcttgaattttgttggctaacattaataatttttgaatttttatcacaataaaacattttaacaaaataggcacttttgtaatcagatcaatagagttataatgtatgtgttttaaataaaaatagctccatgggggctgggcgtagtggctcacacctgtaatcaatcccagcactttgggaggtcgaggcgggcagatcatacggtcaggagtttgagaccagcctggccaatatggtgaaaccccgcttctactaaaaatacaaaaattacccgggcgtggtggcatgcccctgtagtcccagctan

SEQ ID NO: 14032 - DNA, 1758 bp, Homo sapiens
  misc_feature 1755, 1756, 1757, 1758: n = A,T,C or G
cgcgtccgcggacgcgtggggtccccaggcaggcccagaagctgggcagcctctgccgggttccgggaaaaggagctcctgctgccactgctcttccggagcctgcagcatggggcccctgccgcgcaccgtggagctcttctatgacgtgctgtccccctactcctggctgggcttcgagatcctgtgccggtatcagaatatctggaacatcaacctgcagttgcggcccagcctcataacagggatcatgaaagacagtggaaacaagcctccaggtctgcttccccgcaaaggactatacatggcaaatgacttaaagctcctgagacaccatctccagattcccatccacttccccaaggatttcttgtctgtgatgcttgaaaaaggaagtttgtctgccatgcgtttcctcaccgccgtgaacttggagcatccagagatgctggagaaagcgtcccgggagctgtggatgcgcgtctggtcaaggaatgaagacatcaccgagccgcagagcatcctggcggctgcagagaaggctggtatgtctgcagaacaagcccagggacttctggaaaagatcgcaacgccaaaggtgaagaaccagctcaaggagaccactgaggcagcctgcagatacggagcctttgggctgcccatcaccgtggcccatgtggatggccaaacccacatgttatttggctctgaccggatggagctgctggcgcacctgctgggagagaagtggatgggccctatacctccagccgtgaatgccagactttaagattgcccggaggaagcaaactcttcgtataaaaaaagcaggccatctgcttaacccttggctccaccataaggcactgggactcggatttctctatctgatagaggtattttctgtggccctgggagctgtctgtctttcccctacccccaaggatgccaggaagacgtccaccattagccatgtggcaacctttacttctatgcctcacaagtgcctttcagagagccccaattctgctttcccacaaaataaacctaatgccatcaggcaaaacaaaaaaacagcaaaaaataagtggaaatcaaccttacatcctactccttacattgtcacaaccagaccgggatgacccatcatacaagacacgaacgtccccaccacacaataccttggccatctatccctactcctcactctccaaacagcaccttaaaattagccccattcccaagtcgcaacacacacaccatcttcacaccaacactcacacactccatcaacatcacaatacatcacaatcagcacccacgcctccatacaactcacgccaatctactagtcaccatacacagcctactacacacacacacaacaaaccatctcagctacaaatacacagcatataacaacactacgttcctataccgacggtctccacgactgcctcaatctaacacaacactacaacaaactcacatcacgacatcacacatactacaacctaacatccaccactcttccactacaactcgacacaagaagcaacactcctcacaactcaccccatatacgcgacgcaactctcaacatacactatctcactacactctactataccttacacctcatacaacatcactaaaacgaatcaaaactaccctacatatactcacacatcaaagcactcccaacataccaactccaaccccaactaccaatagaatcccacacaacacatcgannnn

SEQ ID NO: 14033 - DNA, 4959 bp, Homo sapiens
cctggactcatccgtgctggacagctcctttctcacgttctcaggccttcacgctgaggtgagggctctactgggggtcctgccgccttggcgcagcttggactcaagaccctgtgcacctctcagcaggcctttgctggacagatgaagagtgacttgtttctggatgattctaagagtgaccttgaggaaccctgggagctcaggaaggaaggagcacccagaagcagggacagggagctggttggggaggaccagaaatcaggttatcaatactctggctgaccatcgtcatcgtgggactgactttggtggaagtccttggttacttatcattactgtgtttctgagaagttataaatttgccatctccctctgcacaagttacctttgtgtgtctttcctgaagactatcttcccgtctcaaaatggacatgatggatccacggatgtacagcagagagccaggaggtccaactgccgtagacaggaaggaattaaaattgtcctggaagacatctttactttatggagacaggtggaaaccaaagttcgagctaaaatccgtaagatgaaggtgacaacaaaagtcaaccgtcatgacaaaatcaatggaaagaggaagaccgccaaagaacatctgaggaaactaagcatgaaagaacgtgagcacggagaaaaggagaggcaggtgtcagaggcagaggaaaatgggaaattggatatgaaagaaatacacacctacatggaaatgtttcaacgtgcgcaagcgttgcggcggcgggcagaggactactacagatgcaaaatcaccccttctgcaagaaagcctctttgcaaccgggtcagaatggcggcagtggagcatcgtcattcttcaggattgccctactggccctacctcacagctgaaactttaaaaaacaggatgggccaccagccacctcctccaactcaacaacattctataattgataactccctgagcctcaagacaccttccgagtgtgtgctctatccccttccaccctcagcggatgataatctcaagacacctcccgagtgtctgctcactccccttccaccctcagctctaccctcagcggatgataatctcaagacacctgccgagtgcctgctctatccccttccaccctcagcggatgataatctcaagacacctcccgagtgtctgctcactccccttccaccctcagctccaccctcagcggatgataatctcaagacacctcctgagtgtgtctgctcactccccttccaccctcagcggatgataatctcaagacacctcctgagtgtctgctcactcgcccttccactctctgcggattataatctcaatacacctcccgagtgtctactcaatccccttccacctcctagctctaccttcagcttccaccctcagcggatgataatctcaagacacgtcccgagtgtttgctccatccccattccaccctcagcggatgataatctcaagacaccttccgagcgtcagctcactccccttccaccctcagctccaccctcagcagatgataatatcaagacacctgccttccaccctcagcggatgatctcaagacaccttccgagcgtcagctcactccccttccaccctcagctccaccctcagcagatgataatatcaagatacctgctgagcgtctgcggattccgcttccaccatcagccgatgataatctcaagacaccttccgagcgtcagctcactccccttccaccctcagctccaccctcagcagatgataatatcaagacacctgccgagcgtctgcgggggccgcttccaccctgagcggatgataatctcaagacaccttccgagcgtcagctcactccccttccaccctcagctccaccctcagcagatgataatatcaagacacctgccgagcgtctgcgggggccgcttccaccctcagcagatgataatctcaagacaccttccgagcgtcagctcactccccttccaccctcagctccaccctcagcagatgataatatcaagacacctgccgagcgtctgcgggggccgcttccaccctcagcggatgataatctcaagacaccttccgagcgtcagctcactccccttccaccctcagctccaccctcagcagatgataacatcaagacacctgccgagcgtctggggggccgcttccaccctcagcggatgataatctcaagacaccttccgagcgtcagctcactccccttccaccctcagctccaccctcagcagatgataatatcaagacacctgccgagcgtctgcgggggccgcttccaccctcagcggatgataatctcaagacaccttccgagcgtcagctcactccccttccaccctcagctccaccctcagcagatgataatatcaagacacctgccgagcgtctgcgggggccgcttccaccctcagcagatgataatctcaagacaccttccgagcgtcagctcactccccttccaccctcagctccaccctcagcagatgataatatcaagacacctgccgagcgtctgcgggggccgcttccaccctcagcggatgataatctcaagacaccttccgagcgtcagctcactccccttccaccctcagctccaccctcagcagatgataatatcaagacacctgccgagcgtctgcggggagcttctgcgggggccgcttccaccctcagcggatgataatctcaagacaccttccgagcgtcagctcactccccttccaccctcagctccaccctcagcagatgataatatcaagacacctgccgagcgtctgcgggggccgcttccaccctcagcggatgataatctcaagacaccttccgagcgtcagctcactccccttccaccctcagctccaccctcagcagatgataatatcaagacacctgccgagcgtctgcgggggccgcttccaccctcagcggatgataatctcaagacaccttccgagcgtcagctcactccccttccaccctcagctccaccctcagcagatgataatatcaagacacctgccgagcgtctgcgggggccgcttccaccctcagcggatgataatctcaagacaccttccgagcgtcagctcactgcccttccaccctcagcagatgataatatcaagacacctgccgagcgtctgcgggggccgcttccaccctcagcggatgataatctcaagacaccttccgagcgtcagctcactccccttccaccctcagctccaccctcagcagatgataatatcaagacacctgctgagcgtctgcggattccgcttccaccatcagccgatgataatctcaagacaccttccgagcgtcagctcactccccttccaccctcagctccaccctcagcagatgataatatcaagacacctgccgagcgtctgcgggggccgcttccaccctgagcggatgataatctcaagacaccttccgagcgtcagctcactccccttccaccctcagctccaccctcagcagatgataatatcaagacacctgccgagcgtctgcgggggccgcttccaccctcagcagatgataatctcaagacaccttccgagcgtcagctcactccccttccaccctcagctccaccctcagcagatgataatatcaagacacctgccgagcgtctgcggggagcttctgcgggggccgcttccaccctcagcggatgataatctcaagacaccttccgagcgtcagctcactcccctttcaccctcagctccaccctcagcagatgataatatcaagacacctgccgagcgtctgcgggggccggtttcacaccttagcggatgagaatctcaagacacctttcgagcgtgaggttacttccctttcacaccttagattcacaccttagcagatgataatatcaagacacctgccgagcgtctgcgggggccgcttccaccctcagcggatgataatctcaagacaccttccgagacgtcctctcaatccccttccaccctcagctccaacctcagacaaatgataatatcgagacaactgccgcggcgtctgcaggcgggccgattgccgcccgtcaggggactgagtaaatctcaagagcaccattccagagacgtcgagtcgtgcactgcctcgcattctcgagcactcaatgcatccaccccgtacaagccaaatagagtaagtatcgataagactgcacttgtgcggaaagccgtctcgcgggagggccgatacgcagcgcatcgagcgtgttgcagttgatctccaataagtcatctccgaagccgataggaggtcgagaggggtatgtgtcgaaacactcgaaacttcgtcccgtcaagaccccatagaataggcggtcacggagacgacctgggtcgcttgagcactcacttgcaatggaggccccgaaattccccaacgcacggccggcaggggttttgaaggcttcgcatgcaaggtaaggaccaagtcgcaaatcaaaaggcgtcatgtcaggccaacggtcgatgtaggtgaacacattcggagttcaggcaaccagaaataacacagtcatttccgttcgttcgaccgaaaaagcaatgtggtgcgcaaaccagcttccatctatgatgagagaccgaaatatcactggagcgacgggcaggcccttcttagaaggtattttcctcccaatggaaagagggcgatacccgagaattcaaaaagggagttgacagcaaggcgcttttggctatgataaccacaggcgtgtgggtcccccataataggaggcagtacgcatgttaactaaggataaagccaatgtgcaccgatcagttataacaaaaccgatcatagcaggtgtgcaacctcctctacagctttgggacataattggtgtgaacgagagacac

SEQ ID NO: 14034 - DNA, 649 bp, Homo sapiens
  misc_feature 1, 2, 3, 4, 642, 648, 649: n = A,T,C or G
nnnnagcgtccggccagggcaagatagaccctgtctctacaaaatttttttctaaattaaccgggcatggtggtgcctgcctgtagtcccacctgtgtgggagaatcacttgagcctgggaggtcaaggctgcagtgagccatgattgcacccctgcactccagcctgggtgacagagtgagaccctggctcaataagagggggaaaaaaaattgttaggagctgggtgcggatgcagcctgcaatcccagctacttgagaggctgaggccggaggattgcttaaacccaagaatttgagcgtagcctgggcaacacagcaagaccccatctaagaaaaaaatgttttttaaatcagcttagcccaaaggggttgtgaatggggaggtataaaaagcaaagattattttttggctactaagccaagaacttacagggatttttttttttcagtcccagaacctacagataccctgctacttgcttcacgtggatgctcagtgcccagcagccatcttaatacattaaaccagtttaaaaaataccttccatgtggagaaaaacatgtctttttctcgcctcaactttatccacatgaatggtgccatagctggcgacgtgctgatgctgtatcacacttgangctgann

SEQ ID NO: 14035 - DNA, 486 bp, Homo sapiens
  misc_feature 1, 2, 3, 4, 5, 6, 7, 8, 9, 12, 306, 324, 395, 437, 438, 439,440, 441, 442, 443, 444, 445, 446, 447, 448, 449, 450, 451,452, 453, 454, 455, 456, 457, 458, 459, 460, 461, 462, 463,464, 465, 466, 467, 468, 469, 470, 471, 472, 473: n = A,T,C or G
  misc_feature 474, 475, 476, 477, 478, 479, 480, 481, 482, 483, 484, 485,486: n = A,T,C or G
nnnnnnnnnacnggcatagacaaaaaaatccttcaagaaaatattggcaaatcaaaacccagcaatattgtaaaaagggataatgcatttatgaaaagtaggttttatccccaaaaattcaaggttgttttaatcttcagaatgaatcaatgcaattcccccatatcagtaaattaaatgaatgggaggcttaagacaccggcagatcactttcccaggttaggaagtttgaagacaagaaaccagcctggccccaaagtgccgtgaaatccctgtctccactgaaaaaacaaataaaaaaattanccaggtgcggtggcacanacctgtaaatcccagctactctggggcatgttgaggcccgagaatctctcgaacccaggaggtggaggttngccattgcactccaccctgggcgacagaagtgagctctgtcnnnnnnnnnnnnnnnnnnnnnnnnnnnnnnnnnnnnnnnnnnnnnnnnnn

SEQ ID NO: 14036 - DNA, 440 bp, Homo sapiens
  misc_feature 1, 2, 440: n = A,T,C or G
nnaagctcgaaattaaccctcactaaagggaacaaaagctggagctccaccgcggtggcggccgctctagaactagtggatcccccgggctgcaggaattcggcacgagtgccagagcaaccaaaggcaggatcctcaccgtggaggaccactactatgaaggtggcataggcgaggcagtatctgctgcggtagtgggcgaacctggagtcacagtcactcgcctggcggtcagccaagtaccacgaagtgggaagccagctgagctgctgaagatgtttggtattgacaaagacgccattgtgcaagctgtgaagggccttgtcaccaagggctaggaaggacatgggatgccgggtgggtgaactacacattccagggatgttctggcaaaggtgctcaagggtgtaccgagtggaaaggtaaatatatgttttgan

SEQ ID NO: 14037 - DNA, 704 bp, Homo sapiens
caccgcggtggcggccgaggtacgcggggggggggtgtccagttggttgccgcggcagtctctccgagcagcgcatttgtcttctaggctgcttggttcgtgcctccgagaaaggggtctcctgctgccagctaagtgtgggagaacttgtgcacgtatctcccctccgaatcccaacgatgggtaacgccagctttggctccaaggaacagaagctgctgaagcggttgcggcttctgcccgccctgcttatcctccgcgccttcaagccccacaggaagatcagagattaccgcgtcgtggtagtcggcaccgctggtgtggggaaaagtacctgcccgggcggccgaggtaccttctccgagttcttagtttcagcatctttgcacttctgaagtcttttatacttgtggcaaaagttcctgaaactggcctccaggtgtccctccacctgtgctggcacttgggcgtttccacgaaacttcccaaacagctcacaatcctggctgactgggacaataattcagcaaactggctactcagacctggcaccaaatgtcctgtccaaaatgctgttcactgaaccagtgctgggcgcccctgggcagggtggctcgatcacccgccacatccacttggccgccagaagccgtcggggaagggagggagggaaaggcagaggcgtcgccaagcggcgccggacg

SEQ ID NO: 14038 - DNA, 1034 bp, Homo sapiens
  misc_feature 1, 2, 3, 4, 1034: n = A,T,C or G
nnnnggagctccaacgcggtggcagcggccgcccgggcaggtacgcgggatctcatctgagacaaacctgaaatgccaaaccaaactgagttagcccctctctgtctgttgtatatattggagtaataacctatttgtcttgataaagggattgcatgcttgaattgcaaaaacctttatttcttttgggttgcccaatgtgcaagactaagagttattttgataaatttctcaccaggctgactgtctctctgtggggtcgggggagttttcagggtctcacgtattgcagggaaggtttggttgtgagatcgagaataacagaagcagcggagcattctggaaatattactatgatggaaaggactacattgaattcaacaaagaaatcccagcctgggtccccttcgacccagcagcccagataaccaagcagaagtgggaggcagaaccagtctacgtgcagccgggccaaggcttacctggaggaggagtgccctgcgactctgcggaaataccaaaaaaacacaaacaaaccaaacaaaatttggggggcgccccggccccgaaaacttccaacacagctcggtggggcgcgcgggcccaagtagtaagagacatggacaagggggggccaagagaactcgggcaaaaaagggtgtggatttcacacaataaaaacgccgggggcacgcgggttcgacaaccgaagggttcggggcacggggacacacggggcaagggcgtaacacgcccggatgggagtgactaaaaaaaatatgaagaaaaaagaaacaaagaaaaacgaaaaaaacaagacgcaaagaggagcgagaaacacaagagagagtcacgacgagaagaaagaagggaaaggaaaagagaacgagccaaaaagcacagcaaggaagaaacaggagagcagcaaaaagcgagcaaacagaggagcaaagaaaaagagaaaaaaagagagcaaagaagaagagaaaagagaggaaagaaaacaagagagagagagagaaacagacaacaan

SEQ ID NO: 14039 - DNA, 1313 bp, Homo sapiens
aggtctttcccctcaaacaaaatgtcttctcatttgataagattcaaactgatgtgtctcatggatcctatttaaaatttgcttctcccccccatcataatcccatccatactgggaagaaaagttgtaaacaaacgttctaggtgagaggaaattgatcctgtcccacaagtcattttaagatgaatgaactcagttgctgacttagcatcccagtcatgggagctgaatgaactgatggccctgatgaaatggtaccacttcttgtggatcagggtcctgaccattttagggtggtccagtaccagactcaattgctctgaaagtaacagactcttctttttgcagtgctttgagtacccgaatttcatccgagtggtcatcacagtccccgaggtgatgatgctggaggcgtgcagccggatccaggagttctgtgagcagcactaccattgtgctgaaggcagccaggaggagtgtgataaataggcctgcatccattctcctgaggatgtgtcccatctagggaaggctggactaggccttgcggctcctcagggactcaggtggccctactgggagaggggcctcaaatgcaccatgtcaagggttcaagattgttcctgcttttccccaagtacaaccacacccacactcagatcctcctcattcacatcgcagattctcccttgctctgcgctgctagagtgactcactaattcattaatctgcctccctctcgtaagatttccttctttttttcttgaaagtaccaggtgaacaaagtttaccagaaagcagttgagacaagaaaataagagctcaggatgagggaaaagaaaaagattgagagaatttgtgcccccaaccatttcctcagactctctaagaaagaacacgctctctccaggcaggtctgaagctcaactctcttattgcctcacttcaggtatacctcactttacacaatagaattataactggaaagaagttggggacacatgtatttggtgattacattttaaacacattaggaaaagttgctatttgaactttttattgatttttggggggagtaaagaattattttgtgatgcaaataaatatcctttaattgatcgacttgccaaatttagatttgtgtgcatcaggctttcttttttttctttttttagagaagttcaatataagcttttcttttctttggttctttctttctttattttgagatggagtcttgctctgtcgcccatgctggagtgcagtggcgcgatctcggctcactgcaacctccacctcctgggttcaagcga

SEQ ID NO: 14040 - DNA, 1622 bp, Homo sapiens
tatagggagtcgacccacgcgtccgctccgccagcccggagcatttaggggcggttggctttgttgggtgagcttgtttgtgtccctgtgggtggacgtggttggtgattggcaggatcctggtatccgctaacaggtcaaaatgcagatcttcgtgaaaacccttaccggcaagaccatcacccttgaggtggagcccagtgacaccatcgaaaatgtgaaggccaagatccaggataaggaaggcattccccccgaccagcagaggctcatctttgcaggcaagcagctggaagatggccgtactctttctgactacaacatccagaaggagtcgaccctgcacctggtcctgcgtctgagaggtggtatgcagatcttcgtgaagaccctgaccggcaagaccatcaccctggaagtggagcccagtgacaccatcgaaaatgtgaaggccaagatccaggataaagaaggcatccctcccgaccagcagaggctcatctttgcaggcaagcagctggaagatggccgcactctttctgactacaacatccagaaggagtcgaccctgcacctggtcctgcgtctgagaggtggtatgcagatcttcgtgaagaccctgaccggcaagaccatcactctggaggtggagcccagtgacaccatcgaaaatgtgaaggccaagatccaagataaagaaggcatcccccccgaccagcagaggctcatctttgcaggcaagcagctggaagatggccgcactctttctgactacaacatccagaaagagtcgaccctgcacctggtcctgcgcctgaggggtggctgttaattcttcagtcatggcattcgcagtgcccagtgatggcattactctgcactatagccatttgccccaacttaagtttagaaattacaagtttcagtaatagctgaacctgttcaaaatgttaataaaggtttcgttgcatggtaaaaaaaacaccaacaacaacaggggagacgacacaagaagaacacccacgaaggggaccaaagaaaacacgtaaccagagtacagtggacacaacgaggcgcccaaaaagagagaccgacatcaaaccgccacggcaacagtgccgacagaatatacagagacgcgcgacagtgggacaaccgcgaaacccaggaaacactcgcgcaagagaccccacactacagagaaggagaccacatgtgaccacaataacatcaacagagaatagaaagcgccctacaagggacacgacaaccgcccaccagcggcgcaacggcggacaacaaacgcggaaaaagagagcagcgagggaagacagacacagcggcaaccaaggggaagtcaagaagaacaaaaataccagccgcacgagcagagacagagagaacaccagccgcacacggcagccggcgccaaccgacccgacaagccgcgaacgcagagcgagcaccagcgcagcgcacagacagcccgaggacgcaagacggaacacggcacgaacaagcacacagcagaacgcaacggaacaaccagcaccacacgacgcgagcacacactgcagcgaccggacgaaagtaacggcgggaccgcccgacccgacaagcca

SEQ ID NO: 14041 - DNA, 841 bp, Homo sapiens
  misc_feature 809, 810, 811, 812, 824, 825, 826, 840, 841: n = A,T,C or G
agggagtcgcccacgcgtccgatgacagtcccgctacccccaccagcatctaaggagagtcttctttctgtttggagttctgtgataagacagatgactcacccagggggatggaggaggatgaccgagggcagttctctcagagagggagttctggctcttcagcttttgtgtcccgccccaccctcagggttcaagcctggccattccaaagcagttaagtttccccaagcatgctttcaagttttgacaattgctgttacctttgcctgagataccccttcttggttacttgaacttttacttgtccttcaagccctccagtacctcctcctccaggaagccttcccaacccaccctctgagctttttattggagcactgatgatcctgggtcaataatgcctgatacacatttgtcttccccatgagactgagccccatgggaacaaaggctatgtctgattcattctgtgttcccagttcccagcacccagcacagggcttggcacaaagaaagggaggccccagggaggccagcggattaggcctgaacagggatcatccagcccatcctcccattcctcttccctggctgattctgtaactttccctaaagggaaaattggcttctgagataacctggctgcgggaagcagaggttgtcgtgagcagagattgtgccattgcactccagcctgggcaacaacagcgagactccatctcaaaaaaaaaaaaaaagaaaaaaaaaaaaaaaagggcgggcgcagtggcgctcattcctgtaatcccaccaaggggaagggaaannnncccccccccatnnnccgcaggcagcacnn

SEQ ID NO: 14042 - DNA, 3716 bp, Homo sapiens
  misc_feature 1, 2, 3701, 3713, 3714, 3715, 3716: n = A,T,C or G
nncagtgggactcagcgggcgtggaggtcgcggctgagcgagcgagccctgggcgagtgaattgtggctgtgggttgacggtggagacaccccccggaggaggcggagggaagggaggcgaggcctgcacctgcatgcttcccgcctcccactccccagcgcccccggaccgtgcagttctctgcaggaccaggccatggagctcgaagtccggcgggtccgacaggcgttcctgtccggccggtcgcgacctctgcggtttcggctgcagcagctggaggccctgcggaggatggtgcaggagcgcgagaaggatatcctgacggccatcgccgccgacctgtgcaagagtgaattcaatgtgtacagtcaggaagtcattactgtccttggggaaattgattttatgcttgagaatcttcctgaatgggttactgctaaaccagttaagaagaacgtgctcaccatgctggatgaggcctatattcagccacagcctctgggagtggtgctgataatcggagcttggaattaccccttcgttctcaccattcagccactgataggagccatcgctgcaggaaatgctgtgattataaagccttctgaactgagtgaaaatacagccaagatcttggcaaagcttctccctcagtatttagaccaggatctctatattgttattaatggtggtgttgaggaaaccacggagctcctgaagcagcgatttgaccacattttctatacgggaaacactgcggttggcaaaattgtcatggaagctgctgccaagcatctgacccctgtgactcttgaactgggagggaaaagtccatgttatattgataaagattgtgacctggacattgtttgcagacgcataacctggggaaaatacatgaattgtggccaaacctgcattgcacccgactatattctctgtgaagcatccctccaaaatcaaattgtatggaagattaaggaaacagtgaaggaattttatggagaaaatataaaagagtctcctgattatgaaaggatcatcaatcttcgtcattttaagaggatactaagtttgcttgaaggacaaaagatagcttttggtggggagactgatgaggccacacgctacatagccccaacagtacttaccgatgttgatcctaaaaccaaggtgatgcaagaagaaatttttggaccaattcttccaatagtgcctgtgaaaaatgtagatgaggccataaatttcataaatgaacgtgaaaagcctctggctctttatgtattttcgcataaccataagctcatcaaacggatgattgatgagacatccagtggaggtgtcacaggcaatgacgtcattatgcacttcacgctcaactctttcccatttggaggagtgggttccagtgggatgggagcttatcacggaaaacatagttttgatactttttctcatcagcgtccctgtttattaaaaagtttaaagagagaaggtgctaacaaactcagatatcctcccaacagccagtcaaaggtggattggggaaaattttttctcttgaaacggttcaacaaagaaaaactcggtctcctgttgctcactttcctgggtattgtagccgctgtgcttgtcaaggctgaatattactgaagaatgatcctgttcaacctcctagtgcctctactgaattattcctcttttaaatggttaatgaaccaataatttttaaatcataccaaaaatagtaagaaaatatgcaaacactctgtgatcaaacttaaaagtcattgccattcatcattaataaaagttgccatttcaactacgtcccaacattccctaatagggtattcagggaacctgtcttaaattgtgcttatctaaatcttggaactttgagctaggggaggagaatgtattagactaaatacaaactgcggggttgtaagggagtctcagaacctcactgaatccttcactccagttaatggcactgctcacttcctgcctctgctgccaccatcactgtgtgaagctttcaagagcttggtacttcccagggctaccggcagtcctctgtagtccagagaggtgagattagatcttcttggttccctgtgaggtttcaggcactaaaactctatgtggggaagggaggggttactcctcctccaatgggactcaaggacttgacctccaggagtaggcccctggtcagaagtgccatctcaccagtggtcttcattcttcctcattcattctttatcatcctgtgttctgtttagttgcaacaatctcttgtgactaatgtcactcaaagcatcttgtaaatcctagggcttcctggaagttagttgccaaagtcatgcaagcatcacctgtcattcttgtgttggagttatagaattctacatcttataaaacctaactggcatttaaaaaatactgtggccgggcgtggtggctcatgcctgtaatcccagcactttgggaggccgaggtgggaggattgcttgagtccaggaatttgagaccagcctggacaacacagtgagacctcatctctatcaaaaaataaaaattagctagatgtggtggcatgagcctgtgttcccagctgcttaggaggctgaagcaggaggattgattgagcctgcgaggccaaggctgcagcaggctgtgattgcaccactgcacttcagcttgggcaacagagcaagaccctgtctccgaaacaaataaaaaatactgtaataaaagtacttataaacatactaatcctctttcaggaccctaaagttgcaggttagtaggtcttcaaggacaaatctgtaagtttcttatttctgtagtgcaagtaaaatttcactttttgaaactatagagagatccctttctgattagcctacagaacttaaagtgagggaaccatttcctctcacagacaaagaggcctgggatattaggactttggggtttgagagcatcatggggcagacagatggtggatggtctggacaagaagcgagtaagccactgcggttggtcatactgaagggaattgatggcaagaggatcccctgagcaagtcagaagttactctcatcagtcgttcatggtcacaacctgaggtactctgctgagtgggcaaggctgaagaagaggcctgtggaatgcagcattacctgctggacagagcagggcaggcagttctatgccttggagctcctgactgcagggactctgtccccacactcagaaagactcagctcactcaatgagagaatgtgatttactttatagaacgtataatcaactttgttgaataatttgttctattaaggctgtctaaagtatgtgatgtcttcatcatagtatgaagtgttgaaaattaataacgagcctagtttaggaaaaagctgcttaaaactgtggctctaagagagtaatcataaaataccttagataaaattgcactatggaattttcattgagtatgtttaaattattggcttgtctactaatacatctgcttcaaaatgaacatatttcataaaattggcatcaattttaatgacgctcctggtatggaacctcagatataccctattggagacaatcctttgatcataaattctccccaactataaatcattttatgtctttatcatataaaaaaattcactggccgtcgttntaccgtcgtgcnnnn

SEQ ID NO: 14043 - DNA, 1249 bp, Homo sapiens
agactccggcagtatttaggcggtgcggcttgggaactagaatccacttcctgtcttccgcctcaggctagagggcgagcgcttcgccgtgggacttcttctgcctggctccgcctcttgccccggaagtactcacagcggacggcggtttttgggcccgtttctgagcagcgcttcctttttgtccgacatcttgacgaggctgcggtgtctgctgctattctccgagcttcgcaatgccgcctaaggacgacaagaagaagaaggacgctggaaagtcggccaagaaagacaaagacccagtgaacaaatccgggggcaaggccaaaaagaaggtagaaataagacctctctgaaagagactagggaagtggtgccaaaggcaaagttcgggacaagctcaataacttagtcttgtttgacaaagctacctatgataaactctgtaaggaagttcccaactataaacttataaccccagctgtgggtctctgagagactgaagattcgaggctcccctgggccagggcagccccttcaggagctccttagtaaaggactcatcgtgctattctctccccctaggacttatcaaactggtttcaaagcacagagctcaagtaatttacaccagaaataccaagggtggagatgctccagctgctggtgaagatgcatgaataggtccaaccagctgtacatttggaaaaataaaactttattaaatcaaaaaaaaaaaaaaaaaaaaaaaaagaaaaaaaaaaaaccgggggaacaaagggagagaggcgcgaaaaaaagagcaaaaaaaggggcccaggggtcaaaaggagaacgggcaccaacttccgtgaacaaggggggaaaacaaggggaggaacccaaaaaagaaacgcgaaaaaaagcgaaacacacacgggaacacgagaataagaccgcgggacaagaacaacaaacacacaaagaaaaacaaggagagaaagaggaaaggaagagaagagaagaagagagaagagacagcagagcaggcaacggacaagaaagacagaagaaaagacagaagaaaaaaaggacgaaaacagaagagacagaaggaaagaagaagaagaaaaggaaaacaagaaaaacaagaaaagaaagaaaaaagaaaaaaagagaaaaaaaaaaagaaaataaaaaaaaagagaaaagaaaagaaaaggagaaaataaaaagaaaaaaaaaaaaaaaaaagaaagaaaaagaaata

SEQ ID NO: 14044 - DNA, 3504 bp, Homo sapiens
  misc_feature 1, 2, 3, 3504: n = A,T,C or G
nnncgtccggagtagaagagggtgactgggcggggagcagctgccggagatgcaaagggacgactgagggaataatcaggagaccactgatgcgatcgcgcccagcggagctaatcagattacctggctagtgtttgcttgttctggagtgatcttctgactggaaaagaactatgtcatggatcaaggaaggagagctgtcactttgggagcggttctgtgccaacatcataaaggcaggcccaatgccgaaacacattgcattcataatggacgggaaccgtcgctatgccaagaagtgccaggtggagcggcaggaaggccactcacagggcttcaacaagctagctgagactctgcggtggtgtttgaacctgggcatcctagaggtgacagtctacgcattcagcattgagaacttcaaacgctccaagagtgaggtagacgggcttatggatctggcccggcagaagttcagccgcttgatggaagaaaaggagaaactgcagaagcatggggtgtgtatccgggtcctgggcgatctgcacttgttgcccttggatctccaggagctgattgcacaagctgtacaggccacgaagaactacaacaagtgtttcctgaatgtctgttttgcatacacatcccgtcatgagatcagcaatgctgtgagagagatggcctggggggtggagcaaggcctgttggatcccagtgatatctctgagtctctgcttgataagtgcctctataccaaccgctctcctcatcctgacatcttgatacggacttctggagaagtgcggctgagtgacttcttactatggcagacctctcactcctgcctggtgttccaacccgttctgtggccagagtatacattttggaacctcttcgaggccatcctgcagttccagatgaaccatagcatgcttcagcagaaggcccgagacatgtatgcagaggagcggaagaggcagcagctggagagggaccaggctacagtgacagagcagctgctgcgagaggggctccaagccagtggggacgcccagctccgaaggacacgcttgcacaaactctcggccagacgggaagagcgagtccaaggcttcctgcaggccttggaactcaagcgagctgactggctggcccgtctgggcactgcatcagcctgaatgaggctggccacctgccactttgccctgccctctgcctccagggctccactccccttccttttcttggtgaaaggcacctcctttcctgataatgaatggtgttccctttgcttggctggggagccccccaggccaggtttgctggccatagatacctttgggctgcctgggacaggctcctgaggaggattgagggtgaaagtctcccacgagtacactaaacctaggtctggtcaccaatagggtttggagagcaaagggccacaactcatcagctgcctgtctcttagatgcactttctttttccaccagcacatccttcaacacacagaatttcagggaagagttctccccaaaaccctagctctttacccttccattttagccttccacccagcttccacaaaagatttggctctaccttggatctgctagtaaataactaataggcaggcagttatttgggtaaggaaaaaaggggtgggagagacagaaaatttgcccatctgctgctcctcccccttggctctccacctgggatttgctattgaatctctaccctctcccaccacacagtactgattgctcactgaaagactcagcacccccaatggtgcgcggaagccaggcgggcgattacaatccaattacctattgtcgactcagcccacacaagcttttctcctcctcttgcagggcatggggccaggctccactcccaaatgagactggccccctccatggttcagggtaacagaagggcctgtaggccctggtgaactgaatccagcacaggcctcccctgtaacacaacaggactgagcagaaccaaacacttcttccaactgactctgctccctgccctcaccatctcaaactctgattcccactccactcttcgaggtttctctcagctttttgacctggctccctaagtaggccctagatgatttattcttggcatggcaaagcttgttctaggtcctctgcttgtgagggtcaaagctgtgtcctttcccttacctccctctgccaggacttgctgcagagctgctgagaggattagtgcctttgaagagctgtctgcctgagcaactctatttcaggtgccccacaccggcaagtaccagccagcaacaccaaccaaatgctactctctttaaagtccattttccttcttcttttttttttttttttggagacagcatctcaccctgtcctggctggtctcgaactcctgacctcaggtgatccgccggcctcaccctcccaaagtgctgggattacaggcatgagccaccatgccagacttcccattttactttctgcaagctgtttccctagcagctccctctaggggagaggtgaaatcttgcaagttgtagcaagagcacacaggaaacccctaactttcctataccccacccgcctcttcccctttctgtcccgggatacctggcggcaagagacttcttggctattgtccatgctcccagaatcaagcataaatgccagacacggcgattgagaagccaatcagtgaaccctttggcaaagcccccatccacacctggcactcccctctaccaatccctggcacagggttcctggagagcaggtgctgtacattttacagctttacaatggggctgttgacagccataattagggaggcatgaattatgcggctataatgcagagccctacaattaaggcgggaatgaggggctggaggcagcaaacggaatctgccctatgagcgtggctgttgagtcctgtctcctgggtctgactttccgtaatatgattggggtacagtagaggtgattaatggggctggcatctctctttggcctgaggttctgtattctgggaaaggtacacagggtggagtagggagaagctgccccaggaggcgatgtagtggtggaaagaagaggcagagaggtcgtcgtcgtcgcccagcagcaagggctgcaaaatagtagaactcgtggttgctttggacaggtgtgatttgtgcaagccaggttcaacccttgcctcaagaaatcagatgggaccaatttagtgtccttccacctgtgagccaagcccccatttgaggacatctatcgtattcttgtgtgctgggtctcaaatagaatttttaaagattcaaaaaaaaaaaaaaaaaaaaaaatgggggggggcgggccacagaaaggttacaaccaccgtggcgggggcccggaagaacagggcacacggccaaggaccggccgagagggggtccaccaaaaagcggggcgggtggaacagggcgggggcgaaagccaacgcn

SEQ ID NO: 14045 - DNA, 2463 bp, Homo sapiens
  misc_feature 1, 2, 46, 49, 53, 58, 169, 181, 2459, 2460, 2461, 2462, 2463: n = A,T,C or G
nnctaaatttagtgatatggtaatgaaattggtatttattttaaanatnagtnattcnaaggagaaaaaaatgcttctgcaagattttcataattcaggggctgtggataggattgttcctctgtttccctaatcattcatctgttcatgtctccctcttgtgccagtnagcctaggttanacagatgccatgctccacaccacgagcagtgtacaaatctggctgcccgtttactttctgagcaagcactggagtccactccgacctttttctttgaacatgcatgctgctggaatatgtataaatcagaactagcagaagtagcagagtgatgggagcaaaataggcactgaattcgtcaactcttttttgtgagcctacttgtgaatattacctcagaaacctgttgtcactcttcacaggttatttaagtttttgaagctgggaggagaaagatggagtagcttggaaagattccagcactgagccgtgggccggtcatgagccacgataaaaaatgccagtttggcaaactcagcactcctgttccctgctcaggtatatgcgatctctactgagaagcaagcacaaaagtagacaaaagtattaatgagtatttcctttctccataagtgcaggactgttactcactactaaactctaccaagaatggaaacaaagaatattttctgaagatttttttgaagattaatttataccctataaaataaaacttgttagcttcgatgaagtcacttcatcttctctcctaccttatttttttaaataagtttttaggtcctgacactgacatcaaatacatgcacaccagaaaggcatttccaccaccgtccccactcattagcgtccagagtgcctttctctctcggctttttttccccctgagctctagttttaaactttctcctgttaaaaaaattgtacttttatttcatgtaaactgcccctctgaggatttgggcatattttttggaaggtgcctaatgcttaggatagtctctagggtgatgcactgcacctgcttccttcccttcagtgcggccgacccatttctgttgaacagatgtctcctgtgtgatgcccctgactcttacatttatctttctaaatcattttctgaagctgacttgctctagggtgcttcatcaccacttccatcttgcatcaccttataactgttctgtcttgttctctcccagcaatttattttaaaacaagggctagcttcaagcatgactgttaatggctcctctgtgacaaaacacaagttggaccaaggagaaagccctttggagaaactggaccctagttcagtttagatctcaaatataggctgaaatctcttaccaaagtgcgttccagataaaaatgagacttagaagacagactggtctaatatgctcactggtcatcacattcagcttattcttacgtgccagtgaggccctaaggtctcagtgcatagcatacctgccactctggatgttttcctgggcttcatatctgtatggcaaggagggagctgtccttcagcagacaaagtcaagcagctttaagtacaaggcagcttgaaacctctctgatgaaagtgaaaaatgtgggtagcttatactttcaaactaatgccagtgactagagagaggtttcattcatgatgtgtatttccaatttggtcttcaattcaagagatgcttcataaaacacttatagccttaaaccattcaagggctaattaaaaaaatagttatgaaatcttagccacaaaaaataaatcaggtaaacattttaacctgtcgttaagtgttgtaacttcaaaaaaccaaaatgcttattttaatgtgatttttctaaaactattgaaaaattaatatttctataatctattaaaaaaaatggagaatgttttctctcaaatttcctctgacccatgggaatgaaaatacttaaatactgtaaagcatatctattaataattcccccaattttttaaactaacaaaatggaatgttaactgaatggaattaaacatagcaattgtcaagccatcaaaattatatatcgaaccacttaggcatgttacggggtaaagtcctcacccctgcatttgagaaatattttattatttttattttaaggcaaaacagtgtttactgtgatgggcagaacagccttttgtatctaggagtccatttgagttctttccaatatttccatatcgttcataaatgtgtctgggggcttccttgtttggaaaatatggatatcgctttgttttcctttgaaagtaattatatcttaagaacatagtatcatgaatggagtagacagggaggctgcagaagccatttttctttgtagataaaaagcattatctatgattgttgtataataaattgatttttacattaaaagaaccaacgttttatgaaaacctaannnnn

SEQ ID NO: 14046 - DNA, 1952 bp, Homo sapiens
  misc_feature 1, 2, 3, 1951, 1952: n = A,T,C or G
nnngcggtgggagggggaccaacaaaccggaggccctcgctcttccaatactcacgccctagctacagaggtcaaggaaggtttccccaggagcagttttggtttcagacggcgccgtctcccgcgaaagtcctgagaggagcccagccttttccgcctgccgcccccggatgggatggttgaggccggggccacgccccctctgcccccctgcgagggcatcctgggctttctcccaccgctttccgagcccgcttgcacctcggcgatccccgactcccttctttatggcgtcgctcctgtgctgtgggccgaagctggccgcctgcggcatcgtcctcagcgcctggggagtgatcatgttgataatgctcggaatatttttcaatgtccattccgctgtgttgattgaggacgttcccttcacggagaaagattttgagaatggcccccagaacatatacaacctttacgagcaagtcagctacaactgtttcatcgctgcaggcctttacctcctcctcggaggcttctctttctgccaagttcggctcaataagcgcaaggaatacatggtgcgctagggccccggcgcgtttccccgctccagcccctcctctatttaaagactccctgcaccgtgtcacccaggtcgcgtcccacccttgccggcgccctctgtgggactgggtttcccgggcgagagactgaatcccttctcccatctctggcatccggcccccgtggagagggctgaggctggggggctgttccgtctctccacccttcgctgtgtcccgtatctcaataaagagaatctgctctcttcaaaaaaaaaaaaaaaacacaacacaaaatcacactgggccagcggccccacaagatacaactcgctggcgggcggccagcgagcgaacgcccaccgggccagaccggcggaagcgttccaaaaaccgggcggctcgaacaggcgggcgggacacacagcaatatccgcgggagacatacaagcgaacgcatctctcgctctccgctctgtcacttttgacacaaatagaaagacgaaaaagacacaacaacaagcacacatcaaacagcaaacgcaagcaacaaaagaaaaacaacagaagaaaaacaccagaccaacgaaagcagccaccacaacaagacaaaaatacaaccagccagcatgaaccaaacacaagagcggcagaaagcagcaacccgcgcggagagagagagagaggggaagaagagacagcaaagcggagcaagtaagcaaacgagagaggagggcgagcacagacagaaaacacgacagagaagacaagaacgcaggaagcgagagagaggacgagagagaagagagaagaacacagccgagagagagagcaaagcagagagaagacgagaagagaagagggagacgcggagcaacgaagaagaagaaagcgcagcaagaaacgaagcacaaccaatgaaaagaagaggaaaagcgagacaggagaagcaagcaggagaggggggggagagagcggtgcggagcgagacgggggagggagagggagaggagagaagagaggggaggggagagcagcaagagggagaacaagagggcgaaggagcggagaggaaagggagggggggagggaggagaaggcgagagagcagggagcgagcggggagcagagggagagcaggaagcacggagaacgaggcgagcggcgcgaagcagggagagcgaggagggacgcaggacgggagggaaggaagacgagacagggacggagcggtgagcagacgagcagagcgaaaaaggaggaagagagcgggaggagcagaggagagagagaggaaggagtgagtaagagagagagcggccggcgggaagggacgcgagagagagagcgaagggcgcggcaggaagagcgagcaggaagcacgaggcgann

SEQ ID NO: 14047 - DNA, 1189 bp, Homo sapiens
  misc_feature 1, 2, 3, 1177, 1187, 1188, 1189: n = A,T,C or G
nnncctattactcatgtgtgtatagaagaaggagaaaagcccatggtgatattgccttacatgaattgggggaatcttaaattgtttttacgacagtgcaagttagtagaggccaataatccacaggcaatttctcagcaagacctggtacacatggctattcagattgcctgtggaatgagctacctggccagaagggaagtcatccacaaagacctggctgccaggaactgtgtcattgatgacacacttcaagttaagatcacagacaatgccctctccagagacttgttccccatggactatcactgtctgggggacaatgaaaacaggccagttcgttggatggctcttgaaagtctggttaataacgagttctctagcgctagtgatgtgtgggcctttggagtgacgctgtgggaactcatgactctgggccagactccctacgtggacattgaccccttcgagatggccgcatacctgaaagatggttaccgaatagcccagccaatcaactgtcctgatgaattatttgctgtgatggcctgttgctgggccttagatccagaggagaggcccaagtttcagcagctggtacagtgcctaaacagagtttcatgcagcctgggggcctacgtctgactcctctccaatcccacaccatcaggaagaagtgctgtcggggctcacttgaagctgtcgggatgctttgatctaaaacaagccacagaagacatttgtttcccgaaaccggggcttaatggtttgaatcttgtactttagaacggctataagcggggtttcctaaatcacctatagggccgaaaggggtggacttggcacttttacactctttggcacgggcctctccacaaacgttttcacctgtttttaaaattgtttagacacagatatttggaattagctatcttagtgccaactgctttttatttttttacttcatcaaggtgatgtaagtgactcacctttaaagtttttttagtgttattttttatcactactctgggaaatggtttgtcttcaagatgcaatacttttcttagtaaaggaaaaacagcataaaaagatacctggtctgccttgtacaagaaaaggcaatattagaggaagaaaatttaaacgaaaagcccagaggaaaaaaaaattttttttnaaaaataccnnn

SEQ ID NO: 14048 - DNA, 643 bp, Homo sapiens
  misc_feature 572, 573, 576, 580, 587, 629, 630, 631, 632, 633, 634, 635,636, 637, 638, 639, 640, 641, 642, 643: n = A,T,C or G
ctccaccgcggtggcggccgaggtacgcgggggcagctgccaagcactccctccctggcttcagggtcagagtgcccagcgtttatcagaggcagcatccaagcccagagccagtgtcgactcttcggctggtgcctttcctctgaggggctatcaatgtgtagataaagccctgagtaggcaagagcagtgagatccactgctatggtcttgatacatcctcaaactttcccttcccagcacagaggaatattggctggcatgcaacctgcaaaagaaaaatgcgaagcggccgggcacggtggctcatgcctgtagtcccagcactttggggggctgaggtgggcgaatcatgagatcaggagttcgagaccagcctggccagcatggtgaaaccccatctctactaaaaatacaaaaaattagctgggcgtggtgacgggcgcctgtaatcccagatactcaggaggctgaggtaggagaatcacttgaacctgggaggtggaagttgcagtgaaccaagatcacgccactgcactccagcctgggcgatggagcgagactccaactcnnaanaaanaaaaaanaaaaaaaaaaagggggggctttaaaattttttaaaaaaaaannnnnnnnnnnnnnn

SEQ ID NO: 14049 - DNA, 2606 bp, Homo sapiens
catcttagcataatcagaaacgagggaggcacggtcgctggtttggcagctcgctcgtttgtcttcttacttgtctctcgtgttgttgctctgaggctattcttcgagtttctgtcagttggcggtttcccggtcgttgctcgcttgcgtagttgttgtcactgtttcttctgttgttctactacttcctttggcctgtttgctccacgtgtgttttgtttttgttccttttgtgtgggacccatgggtcgcgcgttatcgtagttgtatcgggctgtttgcgcccctatgtccgtgttagatacgctgttctttcttgtgttttttaagacatgggtcggagaagtcgtcatcctgggcacacggggatacttccccctgtatgttatgcttcctacctgcttttgccatgtttgctgctgtatccccagtccacaactcgatgcttatgtgttacatactccgtgtacactgagaaccatttttccattgcaacttttcttgtcaaaacatccttctacttacaaggaagattttgcttaagtccttcctttatccctttttttttgagatggagtctcgctctgccgcccgccgttctctcagctcactgcaacctctgccccccaggctcaagcgattctctcgcctcagcctcctgagtagctgggattacaggtgtgcaccaccaggcctggccagtccttccattcttagttcttgaggttatgcagtgtctttgccctgtgcttctcttgtattatgatccaaactccaaaaccagatatgtattttttaaaaccagaacatttattgcatgactaatcgttgacattcttaagatgaactggatgctgcaacagctgccctcttgggtttaggtgttgttccttcacggaatccatgcctgaatctgcggtatacaatttttaggtgcctcattcgaccagttccggtggtatttcgtcttttagccttggcactccagttatactttctcttgcgctgtggctctaaggcctaccaccttcagaagtcgacctgtggcaaatgtggctaccctgccaagcgcaagagaaagtataactggagtgccaagggctaaaagacgaaataccaccggaactggtcgaatgaggcacctaaaaattgtataccgcagattcaggcatggattccgtgaaggaacaacacctaaacccaagagggcagctgttgcagcatccagttcatcttaagaatgtcaacgattagtcatgcaataaatgttctggttttaacaaaatacatatctggttttggtaaggtatttttaatcaattaggcttgtagtatcagtgaaatactgtaggtttagggactgggctagcttcatatcagatttacttgttaagtgactgttttggaatgtttacttttggactgggtttgtaacacggttaaaggcaatgagaaacaagcagaattccaggagtccttgaagcagagggcactggaagacaatatagcagattaaaatagcacagctcatgtggcataggtgggtattttagatgtttgagtaaatttgaaagagtatgatgtttaaattacctttagcaacatgttcatctgctatgctgtcatgactagggggatgattattagtcacatagagcttgggagtaccactggaaacgtatgggtaggagtttaggtggcttctgtttttcaaaagatgatcttatcctagtatctgtaatgctcacttggcacacctgacttgtgggctgtgtgtaaggtggctagctaagtgaaaaaagcctgctaggtgtgagtcaacttaagaatatgtaaataggtttgagaaaaagtagggcttgggtgcaagtaaagattgagcaggaaataaaggaaaatcaagtataatccctgagatttgtagactaaaggcaatgatgtgggactacttggtcgaatttttttagccctcaacttggtaattgggtgtttctgtgttcaagcactgaaacttgctgtcgtgccttcctagttttcgtggtttattgacagggttgggggttttttttgtttttttaaaatgaagggacaaagtcaactggactgctgagtgagagggcaggggcagttgaagggaacatgaattgctggaacagctacataaaatagtgatgtagccaagtcatgctatttaaattataattctccactgtgtttagaataacatctgaggttcttaacctggccttggaagggtatcacttttacttgtaacctggaatggctttataatgtgctagctaattgctactctcatcttgtattttaactcctaatttacccttcaggtctcagcttcagaacattcacttataaagaaaccctgctgattaaatctctcttgggcttcctcccgaaatgtgagactatactttaaagatgtatggttagagtccaattgccattgcctttcttgtttacagatagtgcaatggcgcaatcctggctcactgcagcctctaattcctgggctcaagtcaagtggttctcctgcctcagccttctgagtagctgggactgcagatgcacaccaccacacctggctg

SEQ ID NO: 14050 - DNA, 384 bp, Homo sapiens
  misc_feature 1, 2, 374, 375, 376, 377, 378, 379, 380, 381, 382, 383, 384: n = A,T,C or G
nnatagggagtcacccacgcgtccgggacgcgtgggtgcgtcggcctcggagggtgaaatggagtgtgggcaggagctgaaggaggaagggggcccgtgcttgttcccgggctcagacagttggcaagaaaaccccgaggagccctgttccaaagcctcctggaccgtccaagaaagcaaaaaaaaaaaaaaaaaaagggggggccctttatttttttaaaaaaaaaaatccccaacaccacccgtttagcttgaaaaaaaaaaggaacggcagggggggtgaaaagttttttttttacactaatatgggggaaaaaaaaagcaaatccttccaaaatttcaaaaaaaaaacattttttccccgggattcaaannnnnnnnnnn

SEQ ID NO: 14051 - DNA, 1498 bp, Homo sapiens
agggagtcgcccacgcgtccgcgcactcatcaaaattgaccaccagggcaagctgcctgtcctgctgcttggccgccggtcatcgtcctgcagcgcggagcctgcggccaagggcaggaagatcccaacagtttgcgccataaatataactttatcgcggacgtggtggagaagatcgcccctgccgtggttcatatcgaattgtttcgcaagcttccgttttctaaacgagaggtgccggtggctagtgggtctgggtttattgtgtcggaagatggactgatcgtgacaaatgcccacgtggtgaccaacaagcaccgggtcaaagttgagctgaagaacggtgccacttacgaagcccgttttcccttcaaaacacagtcaccaccgggatcgtgagcaccacccagcgaggcggcaaagagctggggctccgcaactcagacatggactacatccagaccgacgccatcatcaactatggaaactcgggaggcccgttagtaaacctggacggtgaagtgattggaattaacactttgaaagtgacagctggaatctcctttgcaatcccatctgataagattaaaaagttcctcacggagtcccatgaccgacaggccaaaggaaaagccatcaccaagaagaagtatattggtatccgaatgatgtcactcacgtccagcaaagccaaagagctgaaggaccggcaccgggacttcccagacgtgatctcaggagcgtatataattgaagtaattcctgataccccagcagaagctggtggtctcaaggaaaacgacgtcataatcagcatcaatggacagtccgtggtctccgccaatgatgtcagcgacgtcattaaaagggaaagcaccctgaacatggtggtccgcgggggtaatgaagatatcatgatcacagtgattcccgaagaaattgacccataggcagaggcatgagctggacttcatgtttccctcaaagactctcccgtggatgacggatgaggactctgggctgctggaataggacactcaagacttttgactgccattttgtttgttcagtggagactccctggccaacagaatccttcttgatagtttgcaggcaaaacaaatgtaatgttgcagatccgcaggcagaagctctgcccttctgtatcctatgtatgcagtgtgctttttcttgccagcttgggccattcttgcttagacagtcagcatttgtctcctcctttaactgagtcatcatcttagtccaactaatgcagtcgatacaatgcgtagatagaagaagccccacgggagccaggatgggactggtcgtgtttgtgcttttctccaagtcagcacccaaaggtcaatgcacagagaccccgggtgggtgagcgctggcttctcaaacggccgaagttgcctcttttaggaatctctttggaattgggagcacgatgactctgagtttgagctattaaagtacttcttacacattg

SEQ ID NO: 14052 - DNA, 2143 bp, Homo sapiens
  misc_feature 331, 418: n = A,T,C or G
cagaggataggtagagaaagcagccggtgatagtacgtgacttagtgatggacggcgcgggagatgtgaatagcgtggcagctggggttaaggaggcttgatggaagggcgcacggcttgagagtagcggcataattgatatgcgggagtgcatagggttacgcgcggaagatgagagcaggatagaataggagaggatgggttgagggacactagagcgtgagagagggagcgcgtattgaggcgggggatatagtaccgacggaagcatagtgggggcgagatagtaccggcagaggagaagagagagtaggataagtgacaagtgagnctagagagatgcgtgtgtagaggcgcggctggagaatgagagcgacggagagaacgagtagtgaggaacgcatgagagtgagaggcnagagagatggagagagagagggtaggtgcagacaccaggttggagagggaggataagacaggaggtgagagtggagtgtgaggctgatatgagagaggggaacggcggttgtgccgggaagggaggaggatgagcagaaaggggaggtgggaggcacgtgtgaagaggagatagggtagggagagaagaagagaggttagatgaggaagggcagagatatgcggaaatgacgagtgtcggagagagagtgttaggaagtgaggaagaaaaagagttagaaaaggtgcgacaagcacgaaggaggcggtaagagggaggtagacagggcagaggagcagagtaggcaaggaagacggcggagagggtgggaaagaagcggcaggagggagcgctagtagatgagaggggcgagggggtgggaagggggaggggagggcaagggggattgagggtaggctgtacgccgaggggtttgtagcaggtgcgacgagcgggggtaagacggggcggcacgagtgagaagtcggatgttagggggggcggctgaagggagagcgtagggcggtcggccggcagcgcgtagagtgagcgtggggtcgctctaggacggcgcgggctgcgacggcgtactatacggctgcgagaagaccgacagaaaggatgccaaatctgtcaagatcaagaaaaataaggacaacgtgaagtttaaagttcgatgcagcagatacctttacaccctggtcatcactgacaaagagaaggcagagaaactgaagcagtccctgccccccggtttgggcagtgaaggaactgaaatgaaccagacacactgattggaactgtattatattaaaatactaaaaatcctaaaaaaagaaaaaaaaaaaaaaaaaaagacaaaacaaaaaacgaacaaagcaagaaacaacaaacagaaagaaagagagaacaacaacagagacaaaaaggacagagcgacgacacgaacaagaacagagacaagagaggacgcgcgagaaagaggaggagagcggagggggacgaggaaggaggagaggaaggagggagcgaaagaagagagacagaggaacggggcaggagacggagcgaatacaacaaacaacgaagcaaccgcgcacgaagcggagaggcagaaagaggagagaggaaggagcgagcgaagcagcgcgagagacacgggcgcgcaaggcgagagacgacaagacggacgcgaccagaacaagcagccaccaacgagcgcacggagaggacaaacagagaaaggcgccacaaaaccacaacaaacgaggcacgcgcacgagacagcagacagccgacacagacgcaagccgccagaacagaccccgcagcagagaacgctagcgagcgagccgagggaagcgggcgaacaagaaggacgagcacgcgcagagaggcaaacagagaccacgcggggcaccgatacgagccagagccagcgcagacacccggccgagagagcgcggagagagcgcgggcgagggaagcgcgaacggcaaggcagaaagagagagaagagagaacggacagcacgacagggcgaggggcagaacggcggcaagcaccgccccgacaggcgcgagaggaaaggaagagaaacgcgcggcgaaagcagccgaacgcgacgggcagacacgaaaggacagcgccgcagcgggcgcagagcgcaaaggccgagaaaacgac

SEQ ID NO: 14053 - DNA, 1244 bp, Homo sapiens
tcactatagggagtcgacccacgcgtccggatggcctttagtgggtaaatgatgaaagctggatgatggattcgtgtacgttaataatactatttgatttgttatttgatccatttgaaattatatttaaggaaagttaataaacaaatttgtcagaaattatacaaatgttcaataaattaaatttgaaaatgtggccacaatgaaaggaaaaagaaacacttgaacattatttatcacctttggtgtcctttgtgtgtgatgaaattgcattggctgatgtagaagaaagccatatctcatatgtttttattttatgttctttcttggccttttgtttgaccttctatgtcaccatcagaaaagctaagtttgctgtatagtgaggatcaggagatctgatcctgattgcagaaccttccctgattacagaatcttgggattgttgagaggattacatgtaaagtaccaggacagtgcatggcacatgttgtatctcccacttcacccttctagaccatcccagaagatctataagatttcatctgggaaatcactaggagttcttggaagggaaagaaggaagattgttggttggaataaaaacagggttgaatgagttccagaaagcagggttctcaacctcgtggacagcaatctgcagaagaagagaacttcaaaaaaccaactagaagcaacatgcagagaagtaaaatgagaggggcctcctcaggaaagaagacagctggtccacagcagaaaaatcttgaaccagctctcccaggaagatggggtggtcgctctgcagagaaccccccttcaggatccgtgaggaagaccagaaagaacaagcagaagactcctggaaacggagatggtggcagtaccagcgaagcacctcagccccctcgggcagaaaaggggcccgggcagaccccactgttgaaagtgaggaggcgtttaagaatagaatggaggttaaagtgaagattcctgaagaattaaaaccatggcttgttgaggactgggacttaagtttcccaggccagaaagcagcttgtttcaaactcccctggcaaagaaaaatgttggatgcaattctggaggagtatggcaattggcaggaaatcgcgcggacatgttgtacaagagaatatgggggtacagaaatgtgggggggaataaaatttcatggttgttcggccactgcctacaaatgagaggcccatatgtaaatccttgga

SEQ ID NO: 14054 - DNA, 2429 bp, Homo sapiens
  misc_feature 1, 2, 3, 478, 490, 563, 608, 2429: n = A,T,C or G
nnncgtcagtagttaagtgcagagtgagtgcgcattgttatgggaaggcggcagcgaagtagagagagtttctgtgagcggttaacggttatgaaaatatatatacgggagtaaaatgtgtgttcgtgtatggatacagagtcggtaaataggaaagattggaagagggtatggtgcctaacacagtagtataatagaaaagtgggggtggatatacaattgaagtttattattatatcatgagcggacctttggaattgggttagaggtaggtaaggacggcttcaaggaagcgagaaaatctactataagtataataaggcgctcgacagtgcaggttgaattcataaggtaagatatgatcttgggtgagttgaacgagtagggcgaaagctatgggactccaacctacggaacatgagagtccacgcagattgtcgcgtaaccagtttcagtgtcgaccgcacaaacttctcgncaaggtcggaanccgacagaaagatcgtcgtccagttcctcacttcagaggatgctccactcgatgtcatggaatagccagaganactggaagtggtgaacttgctgaacttctcggtgtttgtgggagntgaggtaggtaggtaaaagacctgtcgggtcacgcttttgccacaaattcttcgtaagatgcaaatcatatgcaagatagctgcaatgcaggagctctcgttgaatgcaaaataaacacattttactcctacacaggcgcctaacaccgtcgtcctctgtatcccactttcggttaaggggcagaaataccgccctatctgtaaattaggcccatggaagccgagccgcacctcattcctatatgcaaattagctgctccagtgccgaaagctccgcaccatttgtagttgcgtcggctgtccagcacccagtgcaaacgaggcgtgggtcccggaagctctgttctgcgggtggccgctcgcgcctgccccgtggaggcggcccaggcccgccttgcctcccgcaggtgtcgccgctgtgccgctagcggtgccccgcctgctgcggtggcaccagccaggaggcggagtggaagtggccgtggggcgggtatgggactagctggcgtgtgcgccctgagacgctcagcgggctatatactcgtcggtggggccggcggtcagtctgcggcagcggcagcaagacggtgcagtgaaggagagtgggcgtctggcggggtccgcagtttcagcagagccgctgcagccatggccccaatcaaggtgggagatgccatcccagcagtggaggtgtttgaaggggagccagggaacaaggtgaacctggcagagctgttcaagggcaagaagggtgtgctgtttggagttcctggggccttcacccctggatgttccaagacacacctgccagggtttgtggagcaggctgaggctctgaaggccaagggagtccaggtggtggcctgtctgagtgttaatgatgcctttgtgactggcgagtggggccgagcccacaaggcggaaggcaaggttcggctcctggctgatcccactggggcctttgggaaggagacagacttattactagatgattcgctggtgtccatctttgggaatcgacgtctcaagaggttctccatggtggtacaggatggcatagtgaaggccctgaatgtggaaccagatggcacaggcctcacctgcagcctggcacccaatatcatctcacagctctgaggccctgggccagattacttcctccacccctccctatctcacctgcccagccctgtgctggggccctgcaattggaatgttggccagatttctgcaataaacacttgtggtttgcggccaaaaaaaaaaaaaaaaaaaaaaaaaaaaaaaaaaaaaatagaaaaaaaaaaaaaacaacaaccacaaaaacactacaaataaacaaaaaacaaagggggggggggcccacaaaaatttcctcccccggggggggccccaattttagcacacccccccctttttttgttgagacacgggggcgccacctataaagagggcgtccttatttataccacggaggagcagggcgcgcgactatcaaaccaacagggtccatagcagggaaaaagcatctctctatggagggatcctttgcggagccgacccccatcctcttcgtgtgcggggcacatatatggcggaccccccccctaccaaggaatttaagcgcctacgggggaccaacaaacaactccagcggtgttaatgtggttaacccacgacgtattctttcgtggagaaaaattgggtcacgactttttttaaatgatcgtcggaacacatactatgtcaccagcatatacaacgacggcactcacgaactgctgtgaacgaaatcatggtcgcagtggatacatgactacn

SEQ ID NO: 14055 - DNA, 2608 bp, Homo sapiens
tagggagtcgacccacgcgtccggtgcatttctttgcagaggttacctctttttcttgtctctcgtcaggtctctgacattgacagagcctggacgttggaggaagccccaggacgttggaggggtaaagtaaaagtccacagttaccgtgagagaaaaaagagggagaaagcagtgcagccaaactcggaagaaaagagaggaggaaaaggactcgactttcacattggaacaaccttctttccagtgctaaaggatctctgatctggggaacaacaccctggacatggctccagagatcaacttgccgggcccaatgagcctcattgataacactaaagggcagctggtggtgaatccagaagctctgaagatcctatctgcaattacgcagcctgtggtggtggtggcgattgtgggcctctatcgcacaggcaaatcctacctgatgaacaagctggctgggaagaaaaacggcttctctctaggctccacagtgaagtctcacaccaagggaatctggatgtggtgtgtgcctcatcccaagaagccagaacacaccctagttctgctcgacactgagggcctgggagatatagagaagggtgacaatgagaatgactcctggatctttgccttggccatcctcctgagcagcaccttcgtgtacaatagcatgggaaccatcaaccagcaggccatggaccaacttcactatgtgacagagctgacagatcgaatcaaggcaaactcctcacctggtaacaattctgtagacgactcagctgactttgtgagcttttttccagcatttgtgtggactctcagagatttcaccctggaactggaagtagatggagaacccatcactgctgatgactacttggagctttcgctaaagctaagaaaaggtactgataagaaaagtaaaagctttaatgatcctcggttgtgcatccgaaagttcttccccaagaggaagtgcttcgtcttcgattggcccgctcctaagaagtaccttgctcacctagagcagctaaaggaggaagagctgaaccctgatttcatagaacaagttgcagaattttgttcctacatcctcagccattccaatgtcaagactctttcaggtggcattgcagtcaatgggcctcgtctagagagcctggtgctgacctacgtcaatgccatcggcagtggggatctaccctgcatggagaacgcagtcctggccttggcccagatagagaactcagccgcagtggaaaaggctattgcccactatgaacagcagatgggccagaaggtgcagctgcccacggaaaccctccaggagctgctggacctgcacagggacagtgagagagaggccattgaagtcttcatgaagaactctttcaaggatgtggaccaaatgttccagaggaaattaggggcccagttggaagcaaggcgagatgacttttgtaagcagaattccaaagcatcatcagattgttgcatggctttacttcaggatatatttggccctttagaagaagatgtcaagcagggaacattttctaaaccaggaggttaccgtctctttactcagaagctgcaggagctgaagaataagtactaccaggtgccaaggaaggggatacaggtaaactacaggccaaagaggtgctgaaaaaatatttggagtccaaggaggatgtggctgatgcacttctacagactgatcagtcactctcagaaaaggaaaaagcgattgaagtggaacgtataaaggctgaatctgcagaagctgcaaagaaaatgttggaggaaatacaaaagaagaatgaggagatgatggaacagaaagagaagagttatcaggaacatgtgaaacaattgactgagaagatggagagggacagggcccagttaatggcagagcaagagaagaccctcgctcttaaacttcaggaacaggaacgccttctcaaggagggattcgagaatgagagcaagagacttcaaaaagacatatgggatatccagatgagaagcaaatcattggagccaatatgtaacatactctaaaagtccaaggagcaaaatttgcctgtccagctccctctccccaagaaacaacatgaatgagcaacttcagagtgtcaaacaactgccattaaacttaactcaaaatcatgatgcatgcatttttgttgaaccataaagtttgcaaagtaaaggttgcacaccgatgctccagaattgtgagggagccatactctacagctattccaccgaggataatactaccattgtaaaggcatctcacgggaaaacaacacagctaccatgaaccagcaccatgatctctggatgaaatgctggaagcttctgcagtgtcagctatgagtaaatggatgccaccaccttcacattttcagtaaacaaatactcccctacccatgaaaagttgcatctttgagctgctcacatctccagctaagcctcacaaaagtcaatctgcagggaagaatctaaatcatatgcctacccatgggaaagtctgagaattagagtatttttgtcttctacttttggaggaagaaactaataacgtgggaaa

SEQ ID NO: 14056 - DNA, 876 bp, Homo sapiens
  misc_feature 876: n = A,T,C or G
ggagtcgaccccgcgtccggtggtttctaatgcagctggtcgtgaggcgcaagggttagtgtaggcgaagcagctggcagcgtcgctcgctgtgtggcagcgttttaaattagagctggaaaactggaggagggtcaccgtacctgccgcaggaggggaaggatgggcttcctgcaacctcccttgccccacggcttcccatcctacccccggccgcgttagctgaaggccagcagggacgcaaaagtttttaggccccttaggtctttaggttagcatacgtatcaaggacagtaactaccatggctcccgaagttttgccaaaacctcggatgcgtggccttctggccaggcgtctgcgaaatcatatggctgtagcattcgtgctatccctgggggttgcagctttgtataagtttcgtgtggctgatcaaagaaagaaggcatacgcagatttctacagaaactacgatgtcatgaaagattttgaggagatgaggaaggctggtatctttcagagtgtaaagtaatcttggaatataaagaatttcttcaggttgaattacctagaagtttgtcactgacttgtgttcctgaactatgacacatgaatatgtgggctaagaaatagttcctcttgataaataaacaattagcaaaggactttggaaaaaagggaaagcccgggcggggcccttttaaaaaatggggcccccccggggggagaaaagagggaaaagctagaaaggacctggggctatataactctctacatttaatcggccgcccaaaaaaaaaaaaaaaggggggggggggggtttttttttataaaaaaaaaaacccccccccccccccccccaaaaaaaaaaaaaaaan

SEQ ID NO: 14057 - DNA, 407 bp, Homo sapiens
  misc_feature 1, 2, 3, 4, 5, 6, 7, 8, 9, 10, 11, 12, 13, 14, 15, 16, 17,18, 19: n = A,T,C or G
nnnnnnnnnnnnnnnnnnncaagtcaaagctgttttattatcattcacattatttcatagaaaaaggaatatagcaaacggtcagggtcagggttgtacataaaaaatccaggtttgtggaagtcgcgttctttacatctgggagcggggctgtcccagcatcaggcgcagcagctgcacttgtccgacgcccctttgcagatgcagccctgggcacacttggcacagcccacagggcagcaggagcagcagcttttcttgcaggaggtgcatttgcactctttgcatttgcaggagccggcgcaggtgcaggagtcaccagcggcgcaggagcagttgggatccatggcgagctgaagaggcggctagagtcgggacaggttgcacgcgggttcgctgggacttgg

SEQ ID NO: 14058 - DNA, 1674 bp, Homo sapiens
ggtatcctcttctgttagtcactctgttcctctcttcacactttcccctactgcaccacccaccaatcgattttggtgacactatagaactcgaaggatccacaagtttgtacaaaataagcaggcttgtaaaacgacggccagtaactataacggtcctaaggtagcgaggcctgggtggcgaattcggcacgagcggaggtggcagccatctccttctcggcatcatggccgccctcagaccccttgtgaagcccaagatcgtcaaaaagagaaccaagaagttcatccggcaccagtcagaccgatatgtcaaaattaagcgtaactggcggaaacccagaggcattgacaacagggttcgtagaagattcaagggccagatcttgatgcccaacattggttatggaagcaacaaaaaaacaaaggcacatgctgcccagtggcttccggaagttcctggtccacaacgtcaaggacgctggaagtgctgctgatgtgcaacaaatcttactgtgccgagattgctcacaatgtttcctccaagaaccgcaaagccatcgtggaaagagctgcccaactggccatcagagtcaccaaccccaatgccaggctgcgcagtgaagaaaatgagtaggcagctcatgtgcacgttttctgtttaaataaatgtaaaaactgccatctggcatcttccttccttgattttaagtcttcagcttcttggctaacttagtttgccacagagattgttcttttgcttaagcccctttggaatctcccatttggaggggatttgtaaaggacactcagtccttgaacaggggaatgtggcctcaagtgcacagactagccttagtcatctccagttgaggctgggtatgaggggtacagacttggccctcacaccaggtaggttctgagacacttgaagaagcttggtggctcccaagccacaagtagtcattcttagccttgcttttgtaaagttaggtgacaagttattccatgtgatgcttgtgagaattgagaaaatatgcatggaaatatccagatgaatttcttacacagattcttacgggatgcctaaattgcatcctgtaacttctgtccaaaaagaacaggatgatgtacaaattgctcttccaggtaatccaccacggttaactggaaaagcactttcagtctcctataaccctcccaccagctgctgcttcaggtataatgttacagcagtttgccaaggcggggacctaactggtgacaattgagcctcttgactggtactcagaatttagtgacacgtggtcctgattttttttggagacggggtcttgctctcacccaggctgggagtgcagtggcacactgactacagccttgacctccccaggctcaggtgatcttcccacctcagccttccaagtagctgggactacagatgcacacctccaaacctgggtagtttttgaagtttttttgtagaggtggtctagccatgttgcctaggctcccgaactcctgagctcaagcaatcctgcttcagcctcccaaagtactgggattacaggcatcttctgtagtatataggtcatgagggatatgggatgtggtacttatgagacagaaatgcttacaggatgtttttctgtaaccatcctggtcaacttagca

SEQ ID NO: 14059 - DNA, 952 bp, Homo sapiens
acgcggggattctcctttcttttattcttgtctgttctgcctcactcccgagctctactgactcccaacagagcgcccaagaagaaaatggccataagtggagtccctgtgctaggatttttcatcatagctgtgctgatgagcgctcaggaatcatgggctatcaaagaagaacatgtgatcatccaggccgagttctatctgaatcctgaccaatcaggcgagtttatgtttgactttgatggtgatgagattttccatgtggatatggcaaagaaggagacggtctggcggcttgaagaatttggacgatttgccagctttgaggctcaaggtgcattggccaacatagctgtggacaaagccaacctggaaatcatgacaaagcgctccaactatactccgatcaccaatgtacctccagaggtaactgtgctcacgaacagccctgtggaactgagagagcccaacgtcctcatctgtttcatcgacaagttcaccccaccagtggtcaatgtcacgtggcttcgaaatggaaaacctgtcaccacaggagtgtcagagacagtcttcctgcccaggggaagaccaccttttccgcaagttgccactatctccccttcctgccctcaactgatgacgtttacgactgcagggtggagcactggcgcttgggatgagcctcttctcaagcactgggagtttgatgctccaagccctctcccagagactacagaagaacgtgtgtgtgccctgggcctgacttgggggtcagagtggactcattattgggagacatcttcatcacatcacggattcgccaaagcaatgacgcgaaacgccagcggcctggtatggacatgaacgtaaacgtttcaagcaacaaactcctcacaaacctctgctatagcccaacaccagccatataagacttaactcaggaaacgcctta

SEQ ID NO: 14060 - DNA, 4093 bp, Homo sapiens
  misc_feature 1, 4092, 4093: n = A,T,C or G
nacccacgcgtcaggttccccagctccagccgccgtcgctgctgcctgtgtagttgcagccgcggccgcctcccgccagctcgcctcggggaacaggacgcgcgtgagctcaggcgtccccgccccagcttttctcggaaccatgaaccccaactgcgcccggtgcggcaagatcgtgtatcccacggagaaggtgaactgtctggataagttctggcataaagcatgcttccattgcgagacctgcaagatgacactgaacatgaagaactacaagggctacgagaagaagccctactgcaacgcacactaccccaagcagtccttcaccatggtggcggacaccccggaaaaccttcgcctcaagcaacagagtgagctccagagtcaggtgcgctacaaggaggagtttgagaagaacaagggcaaaggtttcagcgtagtggcagacacgcccgagctccagagaatcaagaagacccaggaccagatcagtaacataaaataccatgaggagtttgagaagagccgcatgggccctagcgggggcgagggcatggagccagagcgtcgggattcgcaggacggcagcagctaccggcggcccctggagcagcagcagcctcaccacatcccgaccagtgccccggtttaccagcagccccagcagcagccggtggcccagtcctatggtggctacaaggagcctgcagccccagtctccatacagcgcagcgccccaggtggtggcgggaagcggtaccgcgcggtgtatgactacagcgccgccgacgaggacgaggtctccttccaggacggggacaccatcgtcaacgtgcagcagatcgacgacggctggatgtacgggacggtggagcgcaccggcgacacggggatgctgccggccaactacgtggaggccatctgaacccgcagcgcccccatctgtcttcagcacattccacggcatcgcatccgtcctgggcgtgacccgtccattcttcagtgtctctgttttttaaaacctgcgacagcttgtgattcctacccctcttccagcttcttttgccaactgaagccttcttctgccacttctgcgggctccctcctctggcaggcttcccccttgatcgacttcttggttttctctctggatggaacgggcatgggcctctctgggggagggcgaggcccgtggggcagggctggaatgggagacctgttggcctgtgggcctcacctgcccctctgttctctcccctcacatcctcctgcccagctcctcacatacccacacattccagggctggggtgagcctgactgccaggaccccaggtcaggggctccctacattccccagagtgggatccacttcttggttcctgggatggcgatggggactctgccgctgtgtagagaccagtgggatgggctctacctctctttctcaaagagggggctctgcccacctggggtctctctccctacctccctcctcaggggcaacaacaggagaatggggttcctgctgtggggcgaattcatcccctccccgcgcgttccttcgcacactgtgattttgccctcctgcccacgcagacctgcagcgggcaaagagctcccgaggaagcacagcttgggtcaggttcttgcctttcttaattttagggacagctaccggaaggaggggaacaaggagttctcttccgcagcccctttccccacgcccacccccagtctccagggacccttgcctgcctcctaggctggaagccatggtcccgaagtgtagggcaagggtgcctcaggaccttttggtcttcagcctccctcagcccccaggatctgggttaggtggccgctcctccctgctcctcatgggaagatgtctcagagccttccatgacctcccctccccagcccaatgccaagtggacttggagctgcacaaagtcagcagggaccactaaatctccaagacctggtgtgcggaggcaggagcatgtatgtctgcaggtgtctgacacgcaagtgtgtgagtgtgagtgtgagagatggggcgggggtgtgtctgtaggtgtctctgggcctgtgtgtgggtggggttatgtgagggtatgaagagctgtcttcccctgagagtttcctcagaacccacagtgagaggggagggctcctggggcagagaagttccttaggttttctttggaatgaaattcctccttccccccatctctgagtagaggaagcccaccaatctgccctttgcagtgtgcagggtggaaggtaagaggttggtgtggagttggggctgccatagggtctgcagcctgctggggctaagcggtggaggaaggctctgtcactccaggcatatgtttccccatctctgtctggggctacagaatagggtggcagaagtgtcaccctgtgggtgtctccctcgggggctcttcccctagacctccccctcacttacataaagctcccttgaagcaagaaagagggtcccagggctgcaaaactggaagcacagcctcggggatggggagggaaagacggtgctatatccagttcctgctctctgctcatgggtggctgtgacaaccctggcctcacttgattcatctctggttttcttgccaccctctgggagtccccatcccattttcatcctgagcccaaccaggccctgccattggcctcttgtcccttggcacacttgtacccacaggtgaggggcaggacctgaaggtattggcctgttcaacaatcagtcatcatgggtgtttttgtcaactgcttgttaattgatttggggatgtttgccccgaatgagaggttgaggaaaagactgtgggtggggaggccctgcctgacccatcccttttcctttctggccccagcctaggtggaggcaagtggaatatcttatattgggcgatttgggggctcggggaggcagagaatctcttgggagtcttgggtggcgctggtgcattctgtttcctcttgatctcaaagcacaatgtggatttggggaccaaaggtcagggacacatccccttagaggacctgagtttgggagagtggtgagtggaagggaggagcagcaagaagcagcctgttttcactcagcttaattctccttcccagataaggcaagccagtcatggaatcttgctgcaggccctccctctactcttcctgtcctaaaaataggggccgttttcttacacacccccagagagaggagggactgtcacactggtgctgagtgaccgggggctgctgggcgtctgttctttaccaaaaccatccatccctagaagagcacagagccctgaggggctgggctgggctgggctgagcccctggtcttctctacagttcacagaggtctttcagctcatttaatcccaggaaagaggcatcaaagctagaatgtgaatataacttttgtggaccaatactaagaataacaagaagcccagtggtgaggaaagtgcgttctcccagcactgcctcctgttttctccctctcatgtccctccagggaaaatgactttattgcttaatttctgcctttcccccctcacacatgcacttttgggcctttttttatagctggaaaaaacaaaataccaccctacaaacctgtatttaaaaagaaacagaaatgaccacgtgaaatttgcctctgtccaaacatttcatccgtgtgtatgtgtatgtgtgtgagtgtgtgaagccgccagttcatctttttatatggggttgttgtctcattttggtctgttttggtcccctccctcgtgggcttgtgctcgggatcaaacctttctggcctgttatgattctgaacatttgacttgaaccacaagtgaatctttctcctggtgactcaaataaaagtataatttttacctgcaaaaaaaaaaaaaaaaaaatgcgggcgcaacgtataaggcagggagagtgtctaccttttcagggaatgggccaaggggatcacgaggcacacgcaaaaagcacaacaagcgaagagacagcactggctaaagagaagatgcaacataacatctgtcgann

SEQ ID NO: 14061 - DNA, 2282 bp, Homo sapiens
  misc_feature 1, 2, 2282: n = A,T,C or G
nnacgcgtccggttttattctttgctgatgtcctttctgcttgaaataacagtcaccatacagctaaaggagaggagtttctttccttctaagtaggcagaaatggtatcattatgttgccgctctccaatctcccagagctcgctctctagagaatcaccttctttcgcttttttttttttttttgaggtagagtctcactatgttgcccagactagccttgaactcttgggctcaagtgattctccctcctcagcctcccgagtagctggaacgaactatagttgcaccactgcagctggcaagaatcaccttctttataaagcgtcagtcatgcttccagcaagaggcagcatcagtcatggctttataacagcttcatggtgcctcaaagactgttgaggttaatgagagcctagattagacagtttggctgtccttccctaaaacttgttttctcctattcactactccccaccgcacttaaaatctatgagtttttactttttactgggaatggaaagtgtggtgaagatcattcaacacttatgttgtcatttctcccattttctgaatttttttttaaatttccccccttttaaaattgttcgaaagcccacagttatggaaagaattactgtctagatggtctgcagaacgtgtttggggtgagtgggagtgaggggcaatgttactttttctccctgtagtttggagtccattatgagctgctgctttttcttctcatcttgtcatcttctggggatgtttgaaggctgagttccaacagaattcacaaagggaataaaacaggattgagattttgaggtgtgcacaaggtggtaagataaagggcatatgagcttcaaaactaatgctgttgcatacatgaagccttttgttttttgaggagctatttttgttattcttgtaacgctccaccttacatgccacgtctgtgtgagtcaacagggatcaggtttggtcaccacacatgtctgaagctgggcagcgtctgctctgtgttctgtgtggaatggagaaaaaaacgcctgccctgctgccttccatgttcataggcccagcccaagagagtgacacacagtgctggccctgagacatttccacaaagtggtcaactctgccttgcatcctaaaactttttgggcatctattttgaaaactataggagcctttggaaggcctcttatgtttggaggggaagggtgttgagattgtcaccatccttcaagctgagactcctggtgagcctttgccaccatgaaaaccacatagctgaccagggctgtgcttgaggtacagaggacacacatcgtagacaggcctgtgtcatgtttccttacagtcgttttttacagagaaaaggggcattgttttttcactgctttctcaacagttcctgtgaataaatgaaacatttcggagctccctgagagcaagagccttcacttcttcttgcggtgccgggaccatgtgttggtgaagctggtgctgtgggggccactcactcgaatgacacctggaggcctgttcctcccttaccactcccttccccagcccgacttcttggcctcctgcccaaccagacacctcaaactctgtcagtgccctggcattctggcagagaatcctcaccagttctcaccaaccttccccccaggcaagggcagctgccagcatggtgctctgccaggacaggtttccctgaaggaagctgctcacactgagatgagcctctcagggcaggacctcttcccaagccctgcacacccacccctgcagcccttttggctccccttttccctgtgcctcagcactcctttcctggttgcagataacgaactaaggttgcctaaagggcagatctgccctctccatgtcttcgtcctggcaaacagggtcgtcttaaaattatgcgctaattctgtatgggagcactcaaaaggcattacttagagattgaaatttcaaactatctctagtttttcaatggaaatatatcagctagggaaaaaccatcaagctcattattattttttgatcttcagttgtatttttgtgaatattttaatacatctttttcaatttctaaaaaaaaaaagtttgataaatacccacgcctccgcggacgcgtgggcggacgcgtgggcggacgcgtgggcggacgcgtgggcggacgcgtgggcggacgcgtgggcggacgcgtgggcggacgcgtgggcggacgcgtgggctagttctagctcgcgagcggccgctcn

SEQ ID NO: 14062 - DNA, 579 bp, Homo sapiens
  misc_feature 1, 2, 3: n = A,T,C or G
nnncacgaggtgtgaccttactcaactgattatcaccctccctgtcatacaatacttcctggctcgatttcctggggggtggtctcagcccactccacctcccctcagccgagcctagagtagaggggccaggcatcctccccaggggaggggcgttgaagcaaggagcctctcctgggctgtcctagcctcacatttacttgaccacaataacctggcaggaggagctggtggaaaggatgaagagctgactgaaggagctcatcaagaagctgcagtacagatatgagaaattctctccctttgccgacacattcaagaagcgcgtcagcaagaacacgttcttcgtgctggtacgggtggtggatgagctctgcctggtggagttgacagaagagatcctgaagctgctgatggaactggtcttccgcctggtgtgcaatggggagctgagcctggcccgtgtgctccggaagaacatcctggacaaggtggaccagaagaagctactcaggtgtgccacctccagccagcccctggcagcccggggggtagcagccaggcccgggaccttgcacg

SEQ ID NO: 14063 - DNA, 883 bp, Homo sapiens
ggagtcgacccacgcgtccgggaggatctggagaattctggaggaagaggagagtgttgctggagctgtacagaccctgcttctcagaggaggaaagagaatcccagagaggccaagaactcactgagagccccacggcgaggtcccaggaaggtggcgtcagcatctgcagccgcgtcgacgttgtcggagcctccgcggaggacccaggagagccggactaggaccagggccctgggcctccccacactccccatggagaagctggcggcctctacagagccccaagggcctcggccggtcctgggccgtgagagtgtccagtgccggatggagtgctgtgatgtgccagccgagacactctacgacgtcctacacgacattgagtaccgcaagaaatgggacagcaacgtcattgagacttttgacatcgcccgcttgacagtcaacgctgacgtgggctattactcctggaggtgtcccaagcccctgaagaaccgtgatgtcatcaccctccgctcctggctccccatgggcgctgattacatcattatgaactactcagtcaaacatcccaaatacccacctcggaaagacttggtccgagctgtgtccatccagacgggctacctcatccagagcacagggcccaagagctgcgtcatcacctacctggcccaggtggaccccaaaggctccttacccaagtgggtggtgaataaatcttctcagttcctggctcccaaggccatgaagaagatgtacctgcccgggcggccggccgaggtgttaaacattcgtagtttccaccaaaagcttggctaatgatggcaacaccttccttggatgtctgagcgagtgatagttaaaacaggagctatgt

SEQ ID NO: 14064 - DNA, 5381 bp, Homo sapiens
agaagcctggcaaccaagaactgtttttttggtggtttacgagaacttaactgaattggaaaatatttgctttaatgaaacaatttactcttgtgcaacactaaatgtgtcaatcaagcaaataaggaagaaagtcttatttataaaattgcctgctcctgattttacttcatttcttctcaggctccaagaaggggaaaaaaatgaagattttgatacttggtatttttctgtttttatgtagtaccccagcctgggcgaaagaaaagcattattacattggaattattgaaacgacttgggattatgcctctgaccatggggaaaagaaacttatttctgttgacacggaacattccaatatctatcttcaaaatggcccagatagaattgggagactatataagaaggccctttatcttcagtacacagatgaaacctttaggacaactatagaaaaaccggtctggcttgggtttttaggccctattatcaaagctgaaactggagataaagtttatgtacacttaaaaaaccttgcctctaggccctacacctttcattcacatggaataacttactataaggaacatgagggggccatctaccctgataacaccacagattttcaaagagcagatgacaaagtatatccaggagagcagtatacatacatgttgcttgccactgaagaacaaagtcctggggaaggagatggcaattgtgtgactaggatttaccattcccacattgatgctccaaaagatattgcctcaggactcatcggacctttaataatctgtaaaaaagattctctagataaagaaaaaaaaaaacatattgaccgagaatttgtggtgatgttttctgtggtggatgaaaatttcagctggtacctagaagacaacattaaaacctactgctcagaaccagagaaagttgacaaagacaacgaagacttccaggagagtaacagaatgtattctgtgaatggatacacttttggaagtctcccaggactctccatgttgtgctgaagacagagtaaaatggtacctttttggtatgggtaatgaagttgatgtgcacgcagctttctttcacgggcaagcactgactaacaagaactaccgtattgacacaatcaacctctttcctgctaccctgtttgatgcttatatggtggcccagaaccctggagaatggatgctcagctgtcagaatctaaaccatctgaaagccggtttgcaagcctttttccaggtccaggagtgtaacaagtcttcatcaaaggataatatccgtgggaagcatgttagacactactacattgccgctgaggaaatcatctggaactatgctccctctggtatagacatcttcactaaagaaaacttaacagcacctggaagtgactcagcggtgttttttgaacaaggtaccacaagaattggaggctcttataaaaagctggtttatcgtgagtacacagatgcctccttcacaaatcgaaaggagagaggccctgaagaagagcatcttggcatcctgggtcctgtcatttgggcagaggtgggagacaccatcagagtaaccttccataacaaaggagcatatcccctcagtattgagccgattggggtgagattcaataagaacaacgagggcacatactattccccaaattacaacccccagagcagaagtgtgcctccttcagcctcccatgtggcacccacagaaacattcacctatgaatggactgtccccaaagaagtaggacccactaatgcagatcctgtgtgtctagctaagatgtattattctgctgtggatcccactaaagatatattcactgggcttattgggccaatgaaaatatgcaagaaaggaagtttacatgcaaatgggagacagaaagatgtagacaaggaattctatttgtttcctacagtatttgatgagaatgagagtttactcctggaagataatattagaatgtttacaactgcacctgatcaggtggataaggaagatgaagactttcaggaatctaataaaatgcactccatgaatggattcatgtatgggaatcagccgggtctcactatgtgcaaaggagattcggtcgtgtggtacttattcagcgccggaaatgaggccgatgtacatggaatatacttttcaggaaacacatatctgtggagaggagaacggagagacacagcaaacctcttccctcaaacaagtcttacgctccacatgtggcctgacacagaggggacttttaatgttgaatgccttacaactgatcattacacaggcggcatgaagcaaaaatatactgtgaaccaatgcaggcggcagtctgaggattccaccttctacctgggagagaggacatactatatcgcagcagtggaggtggaatgggattattccccacaaagggagtgggaaaaggagctgcatcatttacaagagcagaatgtttcaaatgcatttttagataagggagagttttacataggctcaaagtacaagaaagttgtgtatcggcagtatactgatagcacattccgtgttccagtggagagaaaagctgaagaagaacatctgggaattctaggtccacaacttcatgcagatgttggagacaaagtcaaaattatctttaaaaacatggccacaaggccctactcaatacatgcccatggggtacaaacagagagttctacagttactccaacattaccaggtgaaactctcacttacgtatggaaaatcccagaaagatctggagctggaacagaggattctgcttgtattccatgggcttattattcaactgtggatcaagttaaggacctctacagtggattaattggccccctgattgtttgtcgaagaccttacttgaaagtattcaatcccagaaggaaactggaatttgcccttctgtttctagtttttgatgagaatgaatcttggtacttagatgacaacatcaaaacatactctgatcaccccgagaaagtaaacaaagatgatgaggaattcatagaaagcaataaaatgcatgctattaatggaagaatgtttggaaacctacaaggcctcacaatgcacgtgggagatgaagtcaactggtatctgatgggaatgggcaatgaaatagacttacacactgtacattttcacggccatagcttccaatacaagcacaggggagtttatagttctgatgtctttgacattttccctggaacataccaaaccctagaaatgtttccaagaacacctggaatttggttactccactgccatgtgaccgaccacattcatgctggaatggaaaccacttacaccgttctacaaaatgaagacaccaaatctggctgaatgaaataaattggtgataagtggaaaaaagagaaaaaccaatgattcataacaatgtatgtgaaagtgtaaaatagaatgttactttggaatgactataaacattaaaagaagactggaagcatacaactttgtacatttgtgggggaaaactattaattttttgcaaatggaaagatcaacagactatataatgatacatgactgacacttgtacactaggtaataaaactgattcatacagtctaatgatatcaccgctgttagggttttataaaactgcatttaaaaaaagatctatgaccagatattctcctgggtgctcctcaaaggaacactattaaggttcattgaaatgttttcaatcattgccttcccattgatccttctaacatgctgttgacatcacacctaatattcagagggaatgggcaaggtatgagggaaggaaataaaaaataaaataaataaaatagaatgacacaaatttgagttttgtgaacccctgaacagatggtcttaaggacgttatctggaactggagaaaagcagagttgagagacaattctatagattaaatcctggtaaggacaaacattgccattagaagaaaagcttcaaaatagacctgtggcagatgtcacatgagtagaatttctgcccagccttaactgcattcagaggataatatcaatgaactaaacttgaactaaaaattttttaaacaaaaagttataaatgaagacacatggttgtgaatacaatgatatatttctttattttcacatacactctagctaaaagagcaagagtacacatcaacaaaaatggaaacaaggctttggctgaaaaaaacatgcatttgacaaatcatgttaatagctagacaagaagaaagttagctttgtaaacttctacttcatttgattcagagaaacagagcatgagttttcttaaaagtaacaagaaaaggaacaaaaaaaatgaggtttgaaatcttttaccatggcaaaacattaacatctttctcaaaaacatagagaaatctggaaaaatcaagaagataaaattctggaccagttagtgacattctttcaagcatacttgtaaaatgtttccttaaagtgttcttgggatgaaaatgattgtcatgtctccaacaacagtgaactgatgttgttccttggaataaaagtcaatccccaccttaaaaaatgtatggcttctttgaggaattcttatgtcttaaagactttttacattctagacaattaaattgattgaggtcataaattaagaagtgaatagttaccactacacggtaaggtaagcagcctgaaagcatttgtatcatatatgtgtgtgtgtgtgtgtgtgtgtgtgtgtgtgtgtgtagatatataaaataaaaaactcctctacttgtactttggcattcaatttttagaaattcagtctcaaatgccattatggtatttttcaaatgatacctttaagtcaatggtttctttcgactgcaatagagaagatatggcaagaaaaatgttgcagtaccatcttctgggagaacattcatgaaatccttcagttctagttccacagcaacaattgacaatgtttcttttaatgatgacaggtagagttgatacttctctccaccacattttattctctgacaaagttcaggcaacagttttttccaccacagagtccggttctcttctttcagttcatgattagcatatggaatgactgcctccgggcatctctctaacagtatgtctatgcactgttcatactctttcaagcgtgtacgacacagaacatggacactgaggccggcaatagtgtcttctgaaagtggctccaagaacggaataatggaagctatgtcaaatgaaggaccacatataagagactgtaattttgaaagatcttctgtataatttttatcagctaaagaatcagatgatctttca

SEQ ID NO: 14065 - DNA, 1996 bp, Homo sapiens
  misc_feature 1, 2, 1995, 1996: n = A,T,C or G
nnacgcgtcggctgtggttgagggaagcaacacccctcagctcgctccaagcctgccgagaactactggccccagtctggcctggcactggagaaatggggcaggtgctgctggctctgagcccaatggctgagatgtgtctggcctgggtccccaatgccctgcccacgagaggttttccggtcccagagacctggccagtgatggcagcccgattgtggctggaccggggcggggccgaggagctctcggagtgcgtgaatgcgccgtgccggaatgtgggcgtgggaaaggggctggcccggaagaaggagaaagcctgaaaagaaaacagcaacaattcgagctgctgtgacagaggggaacaagatggcggcgccaaaggggaagctttgggtccaggcccaactggggctcccgccgctgctgctgttgactatggcgctggccggaggctcggggactgcagcggccgaagcctttgactcggtcctgggagacacagcgtcctgtcaccgggcctgtcagctgacctaccccttgcacacctacccgaaggaagaggagttatacgcatgccagagaggctgcaggctgttttcaatttgccagtttgtggatgatgggcttgatttaaatcggaccaagctggaatgtgaatctgcgtgcacagaagcatattcccaacctgatgagcagtatgcttgtcatcttggctgccaggatcagttgccatttgctgaactgagacaagaacaactcatgtccctgatgccaagaatgcatctcctcttccctctgactctggtgaggtcgttctggagtgacatgatggactctgcacagagcttcataacctcttcatggactttttatcttcaagccgatgacggaaaaatagttatattccagtctaagccagaaattcagtatgcaccgcagttggagcaggagcctacaaacttgagagaatcatctttaagcaaaatgtcctatctgcagatgagaaactcacaagcacacaggaactaccttgaagaggaagaaagcgatggctttttaagatgtctatctcttaactctggatggattttaaccacaacccttgtcctctcggtgatggtgttgctctggatctgttgtgcagctgttgctacagctgtagaacagtatgttccccctgagaagctgagtatctatggtgacttggaatttatgaatgaacaaaagctgagcagatacccagctccttctcttgtgattgttaggtctcagactgaagaacatgaggaggcagggcccctgcccaccaaggtgaaccttgctcactcagaaatctaagctttttaaaagagtcgtggacacataaacttccattcctcatagagctttttaagatggtttcattggacataggccttaagaaatcactataaaatgcaaataaagttaccaaactctgtgaagactttatttgctgtgactttacctgtatttttctagtcatttaagatggacattgggttgtatttttattttactaatatctgtagctacttagttagttgcattggttttggtttttttcctctcttcgccaaattctatgagctgatcattgtggccccgcccctgccatgccccccgtcagtcatctcacttaataaccgaaaccttagggtgtgatgcttctgcccggaaatggcctccaaactgtcctctggattatagcagaaatgttatttaatgacactacattttcagttgtattgaattgaaatcattaaaatctatttgaataattatgttcttgaaaaaaaaaaaaaaaaaaaaaaaaagggggggggagaaatcccgggggcaaattttggtccccttttgtagagggccaaggggggttaaaaggcggggggttacagtgggggaaagttggggttgcggacctttgtggggtggcgcccagaaccggaaaaagttgggagaggcggggagtann

SEQ ID NO: 14066 - DNA, 1173 bp, Homo sapiens
  misc_feature 1, 2, 1159, 1160, 1161, 1162, 1163, 1164, 1165, 1166, 1167,1168, 1169, 1170, 1171, 1172, 1173: n = A,T,C or G
nnaaattaaccaactttgacctgtctttagaaaaaggcttatttgtatgattttgggctaactccccggggaccatattaaatgacaaaaatgctcctttgggtgacacaccctacaaagtatttgctgttacgaacataaacgcccacattcttaatatctaatatttttgaccagtgatgttttatgctgtcatctgaaccctagagaagcagtgtcagaggaaaccttggtgtcacatgtgtcttagcaaaagggttaccatgatcgagggtcatgtgaccaaaagatgctccagagaagcttgagaatttgtttcaagttgggaggagggttggagatacaaaaatcactctgctctacaggactcttcagctgtctatgcaagaaattccgttttctctttcagcacctggaaagacacagcagcccaccgaggcgataggtgattcactaagcacaagaggaatgttttctaagcaaggcgtcccttgcctctcaaacaaatgccctccaagtttgttagggtttctattcctgcaacttgtggtatcaaaaccacttcctggaattgtcaaagcactgccaaaataaatgtttttcccccttctaagaaaaaaaaaatgacagtgctcatatttgacacttgtgtattggactctcttttgaatgaataaaaaggaaaaggggtttggtgtaattcctgatggggtgcgtgttgtttttcatgccatggtttgtgaattttaattgtggtttcccatttcgttgttgtaactgggcagaaattaaaaaagaaaaatcaataaaaatacaaagaaatggcgcaaaacaaatcacacaacaaaaaaaacctgcgccggggccgcacagaggccatgaagaagaggcttcacaaacaccacgcgctgtgtggggcgcgagggcccccatgcaggtggaatgtgacagcatcggtgcacaacagagggcgtgcccacgaggagaaaaacccgcggcgcacagacagaaaacggggcgtcgggagattctccacccgcaagtaaaaaaaagacccgccgggggggacaacacagaagctgtctggcacacacaatcccaaaagagggccacaaacgcgcccaccaccgaggcatgcatcacacaggacgtcacaacnnnnnnnnnnnnnnn

SEQ ID NO: 14067 - DNA, 2230 bp, Homo sapiens
acgcgggggtaactgaaaatccacaagacagaatagccagatctcagaggagcctggctaagcaaaaccctgcagaacggctgcctaatttacagcaaccatgaggccacttaaggatgcagcaagaaggagccatctgcaatccaggaagaaattccttgccaggaaccaaattggttgtcaccttcatctaggacttctagcctcgagaacttacaaatggtgatgatcatcaggtcaaggatagtctggagcaattgagatgtcactttacatgggagttatccattgatgacgatgaaatgcctgatttagaaaacagagtcttggatcagattgaattcctagacaccaaatacagtgtgggaatacacaacctactagcctatgtgaaacacctgaaaggccagaatgaggaagccctgaagagcttaaaagaagctgaaaacttaatgcaggaagaacatgacaaccaagcaaatgtgaggagtctggtgacctggggcaactttgcctggatgtattaccacatgggcagactggcagaagcccagacttacctggacaaggtggagaacatttgcaagaagctttcaaatcccttccgctatagaatggagtgtccagaaatagactgtgaggaaggatgggccttgctgaagtgtggaggaaaaaattatgaacgggccaaggcctgctttgaaaaggtgcttgaagtggaccctgaaaaccctgaatccagcgctgggtatgcgatctctgcctatcgcctggatggctttaaattagccacaaaaaatcacaagccattttctttgcttcccctaaggcaggctgtccgcttaaatccagacaatggatatattaaggttctccttgccctgaagcttcaggatgaaggacaggaagctgaaggagaaaagtacattgaagaagctctagccaacatgtcctcacagacctatgtctttcgatatgcagccaagttttaccgaagaaaaggctctgtggataaagctcttgagttattaaaaaaggccttgcaggaaacacccacttctgtcttactgcatcaccagatagggctttgctacaaggcacaaatgatccaaatcaaggaggctacaaaagggcagcctagagggcaaaacagagaaaagctagacaaaatgataagatcagccatatttcattttgaatctgcagtggaaaaaaagcccacatttgaggtggctcatctagacctggcaagaatgtatatagaagcaggcaatcacagaaaagctgaagagaattttcaaaaattgttatgcatgaaaccagtggtagaagaaacaatgcaagacatacatttccactatggtcggtttcaggaatttcaaaagaaatctgacgtcaatgcaattatccattatttaaaagctataaaaatagaacaggcatcattaacaagggataaaagtatcaattctttgaagaaattggttttaaggaaacttcggagaaaggcattagatctggaaagcttgagcctccttgggttcgtctacaaattggaaggaaatatgaatgaagccctggagtactatgagcgggccctgagactggctgctgactttgagaactctgtgagacaaggtccttaggcacccagatatcagccactttcacatttcatttcattttatgctaacatttactaatcatcttttctgcttactgttttcagaaacattataattcactgtaatgatgtaattcttgaataataaatctgacaaaatattagttgtgttcaacaattagtgaaacagaatgtgtgtatgcatgtaagaaagagaaatcatttgtatgagtgctatgtagtagagaaaaaatgttagttaactttgtaggaaataaaacattggacttacacgaaatgtttaattcattcattttattgtgaaataaaaataaaatccttagctcctccaccaactgaacagaccctcttggccaaggagaccccagaaaccttaaaaactaagtttcccaaccatgacaagatgagagatcattcacacctcattatattccctcccttgctaactgccattggactttttccactgagttaaacagaaacccatggaaaacaaagaacagaagactcactccttggctgacttcacctagctcactccacgtgcgccacagccagactcccctcccctctgcgttcaaatga

SEQ ID NO: 14068 - DNA, 1516 bp, Homo sapiens
gccggtaccggtccggattcccgggtcgacccagcgtccgggccttgcgtccgagcgctttcgttcaactccggctcctcagaggcgtttcccttcgtttcggagtccttggagcgaaggcattttaaaatgcctcctttattaattttcttccaaagacaagggaaggccggcggacgacctgtgggccctttagttaccaagtcgcagtggtacgcggaggaccgagactaggaacggaccttgacctttaacctctagccggggcggcggagggaaacgcctccgtctctatataaggagttttccggacgctctgggtcctttttttccctcagcgctggccgcggcctcccggcgctctcgtcctccgcttttgcacagctccccgttccagccttcgccatgggattcggagacctgaaaacccctgccggcctccaggtgctcaacgattacctggcggacaagagctacattgaggggtgagcaggagccgagaggctggggggccggggccacgtggcgcgggctcggcgggaaggaagcgggtctccggatgctgggggacgccgagtcagtgctcccggggccgggatgccaatggagcgggacctgccgggaggggctgccagcattataattgagatgatgcttgctctccgtgtgcccacgtccagctggttcttccgcgtctttggacaagtacgtgccatcacaagcagacgtggcagtatttgaagcagtttctggtccaccacctgctgacctgtgtcatgccctacgttggtataatcacatcaagtcgtatgaaaaagaaaaggcccagcctgcggggagtgaagaaatctttgggcaagtatggccctagcagtgtagaagacaccacaggaagtggagctgcagatgctaaggatgatgacgacattgatctctttggatctgatgatgaggaggaaagtgaggaagcaaagaagctacgagaagaacgccttgcacagtatgagtccaagaaagctaaaaagcctgcagttgttgcgaagtcttccatcctactagacgtgaagccttgggatgatgagacggacatgacaaaactagaggagtgtgtccgaagcattcaagcagatggcctggtgtggggctcctctaaattggttccagtgggatatggaattaaaaagcttcaaatacagtgtgtagttgaagatgataaggttggaacggatatgctggaagagcaaattactgcttttgaggactacgtacagtccatggatgtggctgcttttaacaagatttaaatcattcttaagtcagtgcacttaaataaaagcttgaaagataaaaaaaaaaaaaaaagggaaaaaaaagaaaaagggggaaggagaggaagaggagagagaaaaaaaaagggggcggccgccctaggggttcacggcttgcttgccgtgactgggggggtaaaagcccttcagggggtcccccaattcgttccctgggcgcgtttttacaa

SEQ ID NO: 14069 - DNA, 1492 bp, Homo sapiens
tatctactacctagagggcgaattggagctccaccgcggtggccggccgcccgggcaggtactggatcagtttctcctgcgtgaggtatgggtgacactcaacctggttagtcactggtttatatttcagtccaggtttgttcaagagcctctcgatctggaagtggttgaaatttgagaccccaagggctttcaccagcccctcgtccaccagctcctccatggcctcccaggcatccaagaacgttccttttccactgatcatattacctttatcatctttggggaaaaagtcatccccagtcttgaatccctgtggccagtgaataagatagacgtccagatagctcaacttcaggtccttgagggtcttctcaaaggctttcctcacaaggggtctctcaaagaaagtgggccacaccttgctgacgatgaacaggtcctcccgtcgagcggccgcccgggcaggtacgcggggagcagggaaccgctcagatacccttccacaccgtggaaactttgttcttaccctcttgacgaaaaatcttgctgctgctcactctttgggtccacaccacctttaagagctacaacgatcaccacgacagtctgcggcttcattcttgaagtcagcgacaccacaaacccaccagaagggagaaactccagacacatctgaaggaacaaactccagacacaacatctttaacagctgtaacacacactgtgaaggtccacggcttcattcttgaagccagcgagaccacgaaccctctggaaggaaccaactctggacacagcaggacgtgagacttctacctgctcactcagaatcatttccgcaccaaccatggccacgtttgtggagctcagtacaaaagccaagatgcccattgtgggcctgggcacttggaggtctcttctcggcaaagtgaaagaagcggtgaaggtggccattgatgcagaatatcgccacattgactgtgcctatttctatgagaatcaacatgaggtgggagaagccatccaagagaagatccaagagaaggctgtgatgcgggaggacctgttcatcgtcagcaaggtgtggcccactttctttgagagaccccttgtgaggaaagcctttgagaagaccctcaaggacctgaagctgagctatctggacgtctatcttattcactggccacagggattcaagactggggatgactttttccccaaagatgataaaggtaatatgatcagtggaaaaggaacgttcttggatgcctgggaggccatggaggagctggtggacgaggggctggtgaaagcccttggggtctcaaatttcaaccacttccagatcgagaggctcttgaacaaacctggactgaaatataaaccagtgactaaccaggttgagtgtcacccatacctcacgcaggagaaactgatccagtacctcggccgccaccgcggggagctccaattcgccctacaggtagca

SEQ ID NO: 14070 - DNA, 284 bp, Homo sapiens
acgcgggggaagagctgctcagttaggacccagagggaaccatggaaaccccagcgcagcttctcttcctcctgctactctggctcccagaaaccaccggagaaattgtattgacgcagtctccaggcaccctgtctttgtctccgggggaaagagccaccctctcctgtagggccagtcagagtgttagcagtgagcagttagcctggtatcagcagaaacctggccaggctcccactctcctcatctatggtgcatccaccagggccattggcatcccagac

SEQ ID NO: 14071 - DNA, 1816 bp, Homo sapiens
acaaaggccaagatgcccattgtgggcctgggcacttggaggtctcttctcggcaaagtgaaagaagcggtgaaggtggtcgagcggccgcccgggcaggtacgcggggagcagggaaccgctcagatacccttccacaccgtggaaactttgttcttaccctcttgacgaaaaatcttgctgctgctcactctttgggtccacaccacctttaagagctacaacgatcaccacgacagtctgcggcttcattcttgaagtcagcgacaccacaaacccaccagaagggagaaactccagacacatctgaaggaacaaactccagacacaacatctttaacagctgtaacacacactgtgaaggtccacggcttcattcttgaagccagcgagaccacgaaccctctggaaggaaccaactctggacacagcaggacgtgagacttctacctgctcactcagaatcatttccgcaccaaccatggccacgtttgtggagctcagtacaaaagccaagatgcccattgtgggcctgggcacttggaggtctcttctcggcaaagtgaaagaagcggtgaaggtggccattgatgcagaatatcgccacattgactgtgcctatttctatgagaatcaacatgaggtgggagaagccatccaagagaagatccaagagaaggctgtgatgcgggaggacctgttcatcgtcagcaaggtgtggcccactttctttgagagaccccttgtgaggaaagcctttgagaagaccctcaaggacctgaagctgagctatctggacgtctatcttattcactggccacagggattcaagactggggatgactttttccccaaagatgataaaggtaatatgatcagtggaaaaggaacgttcttggatgcctgggaggccatggaggagctggtggacgaggggctggtgaaagcccttggggtctcaaatttcaaccacttccagatcgagaggctcttgaacaaacctggactgaaatataaaccagtgactaaccagaactccctaggaacaatgcaaaacagagccggctttccccgtgatgaggattgtttgctgttgcaggttgagtgtcacccatacctcacgcaggagaaactgatccagtactgccactccaagggcatcaccgttacggcctacagccccctgggctctccggatagaccttgggccaaacctgaggacccttccctgctggaggatcccaagattaaggagattgctgcaaagcacaaaaaaaccacagcccaggttctgatccgtttccatatccagaggaatgtgacagtgatccccaagtctatgacaccagcacacattgttgagaacattcaggtctttgactttaaattgagtgatgaggagatggcaaccatactcagcttcaacagaaactggagggcctttgacttcaaggaattctctcatttggaggactttccctttgatgcagaatattgaggttgaatctcctggtgagattacacaggggatcctctttcttcgctgaagtgtgactgtctccactcaagaactattttagccaagcttatctgagatcacagtgaactttgtcctgttgtagaccagaatggaggtgctgttttagacatgtatttctgtatgttcaactaggataagaatatcacagaaaagcatggcctgaataagcaaatgacaattttttccacttatctgatctgatcaaatgtctgttaagcaccagaaactctgccaacactgaggatgtaaagataaataataaaaaataatgacttg

SEQ ID NO: 14072 - DNA, 2907 bp, Homo sapiens
  misc_feature 1, 2, 2905, 2906, 2907: n = A,T,C or G
nncaccggaaaaactaagggccaccggaagtcacgtggaactgggcaggggctccaacccaatccccccgagaagtggaaaacagcgggccaaaggggccgaaccccgcccaatgccagaggtccggcacagccttcttgaggaccgggaagtgaatattggagaaccccagatcttccccgaaccagacacatgccccgccaagcagacacgcccagcttgcctaaaatctcatcccacaagctcttttgcacctacactttgcctcacattctcttctccccagtaccaaaaaagcctaaaatcagccagggtggctcacacctgtaatctcagcactttgcgagccgaggtgggaggacagctttgaggccaggagtttgagaccaacctgggcagcatagcaagaccctgtctctacaaaaagttaaaaaattagctgggcgtggtggcatgcagctactcaggaggccgaggtgggaggactgcttgagcctgggaggtcaagcctgcagtgagctatgatcgtggcactgcactccagtgtgggtcataaagcgagacactgtctttaaacaataaaagcctaaaatcagagaggtctaccatgtgttttgaaaatccaggagccaaaaaattttgtttttctttttggtggtggtggtgatttttaactaaaaagcaaacataaaacacacagaacattgctggttacaactaagacttgcgtaatggttgctgaagaaaaatccaccagagtactgggaggggctcagttggtctttgttcagaaagtccaggttaaccacatagaaaaatcctaatcattcatgtttaaatgtctgctagtttaaatttatgtaattaaaaaaataggtatcccatttcaaattctctccctcccaactccatttataaggtataccacatgccttatgcacacttttttttcaaacactggtttggtatttaagttgctcacccccatccatcaccaatgtgaataagaaaaaatatatagaaatacaaactacatagcttgacaacttacccaaatataaaatattttcagattatttgaacaagggaaaaaaacacgtactaaaagacttaagtattctaagattttggaatattttgatttgggacaagtaacaagtattttaagcaaaatcctgtttctaccctggataaggaactgaagtcaaaatccctgcttcacagtattttctggtgaggacaagggacgtgggttgagagtttattccttaagtaagaaccaagctttatttatttacaaaaaaaaaaaaaaaaagttgggggcaaaggggaagacaagttttacacaaaagtactacaatggtaactccctttggtaaaaagtgtaataaatgtcttgtacatctgttcataggtactaaatctgaagccacagtactatggtacacaagaagctagagcagttatgctagcacatcaaagcatatttcttttaataaaaaattgacagtatgtacattatgtacaaaaaaacaagttaaaattgtgtgtgtgtgtgcgtgtgtgtgtcagagagtaaagctggtggatggcactaaggtagactagtaaagaggcagatacaaaacagttccacgggagctaaaaaggacaactgatttgaactcgttgaggttgagaaccagaggagagaaaagggtaggcagcaagggaatcgtcaggaataaaatccacaagatgatcaatcccaaagccaaactgcaggtcccagataaaacctaatgggtgatcttagatgtgctcgagtgaccagaaaaaaaaaatcaaatccagcttttttttccttttgtggggaggggagaggagcagtgaccatgatagttccaatccatctgagtattaagtccttctccagtctgttttgtaaatgcatctccatccagtcaaagtgtgaacagcatccggttccctcattgaaagttaggccacaggagactccagtcttagctctgctggtgtgtgcaagcaaacagcatgtctttgcttgcatggacttccttcccctccagggcaggctatacccaaaaccctttgggaaaagttccagcttcagctttgtaaggtattcatgttcctaacaggtagcccacttggtgccaggctgcaccagccacacacaggtcaggtggccatgtcccagagaggcccagtgaggcttgaaaggcatcttccttgtttcttcagtgtgtgagtgcataggcccacacacacatccccacacacaccccaagttatctgctctggctttgcagttaaggggctttgaatactgtgccgtatttgacacgatacttgttaatgctcacaaaatgcagggtctctgtatcacaggtggtggtacagggcacaggccctccagcccctcacccatgagccacttgctggtctctgctgcatttcacggggcacatgctccttggtccatttatctacccaggcctggaatctctgatgtagacgcttgcttacacgctcatgggactgatgagcccggagcagggcggtcctccgatacatatagtcctctgatttgatcacatacaccatcttgtaggaattcagcttgaatctacactccagcttatccagactatccacattctccatggtcttcttgctgtttccttccttcccttccttttcctgctgctctcgaccacgttgacacttccggatccgccgtagattcctggggagaaatactggtttctgtgctagatgttcacgaagctcaggcgaggtagtatctgaattcatgtatcgctccacgtagtctgaccagcgctctgcttccacagggtcatccgaattctcctcttctgtgtccaggaagctcaatagtcannn

SEQ ID NO: 14073 - DNA, 987 bp, Homo sapiens
  misc_feature 1, 986, 987: n = A,T,C or G
nacgtgtatatatattatatatacatatacgtgtgccatgttggtttgctgcaccccttaactcgtcatttacattaggtatttctcctaatgctatccctcccccagccctcaccccatgacaggccctggtgtgtgatgttccccgtcctgtgtccaagtgttctcattgttcagttcccacccatgagtgagaacatgctcgcaccgccgcttctaaatgttttaaaaacaaagacaccaatgcccttcattggggaaatgaaagacttttaagtaaaacgattttgagtgaaataatatttgttgttttaaaaagttaatattaaccactctccatcatatgttgaaattatcttaagatgtgaaagttaaaattagaaaccttgtaaaggaaaaataggaaatagtttcatgaacttgacacaggaaaatatttcttagactagatactgtagcactcaccacaataagaaatcaagcgaattgcacttcatttttaaaaagcttctccttattatgttgttgtttaacaacttaaacgctatctctagaccaggaataattatttgctatataatacagcaaaaaatatgtatgtataaatggactcattcaaaatatataaagaactcctattacaaagaaattgacaaacagcccagtatatcaatgaatataaaaatttgagaagatattttccataagaagatatctaaatgaacattaggctgagaaaaccaaattttatgatatcactacacacctggcatagtttcacagaccgcatattagtgttgtgggatgttaagcactggaatggccacatctctctgaaatttcaggcctccattcttgcccactttcacatttttccgtcccaggatcctctcttatccggaaaattgtttccccacatgtgaatttccttcacggtattaacccccaagatatgggtcccctttccccaggaaccttctcacacnn

SEQ ID NO: 14074 - DNA, 2076 bp, Homo sapiens
  misc_feature 2074, 2075, 2076: n = A,T,C or G
ccacgcgtccgcgtggaggaagagggggaagttggcgcatgcgcctaaagctgacgggtttgaaatggcttcgatgttagccgggacccgactcagatcgatgctatagaagacaaacaagggaaggttttttttccttttgcatcatggctcaatttggaggacagaagaatccgccatgggctactcagtttacagccactgcagtatcacagccagctgcactgggtgttcaacagccatcactccttggagcatctcctaccatttatacacagcaaactgcattggcagcagcaggccttaccacacaaactccagcaaactatcagttaacacaaactgctgcattgcagcaacaagccgcagctgcagcagctgcattacaacagcaatattcacaacctcagcaggccctgtatagtgtgcaacaacagttacagcaaccccagcaaaccctcttaacacagccagctgttgcactgcctacaagccttagcctgtctactcctcagccaacagcacaaataactgtatcatatccaacaccaaggtccagtcaacagcaaacccagcctcagaagcagcgtgttttcacaggggtggttacaaaactacatgatacatttggatttgtggatgaagatgtattctttcagcttagtgctgtcaaagggaaaaccccccaagtaggtgacagagtattggttgaagctacttataatcctaatatgccttttaaatggaatgcacagagaattcaaacactaccaaatcagaatcagtcgcaaacccagccattactgaagactcctcctgctgtacttcagccaattgcaccacagacaacatttggtgttcagactcagccccagccccagtcactgctgcaggcacagatttcagcagcttctattacaccactattgcagactcaaccacagcccttattacagcagcctcagcaaaaagctggtttattgcagcctcctgttcgtatagtttcacagccacaaccggcacgacgattagatcccccatcccgattttcaggaagaaatgacagaggggatcaagtgcctaacagaaaagatgatcgaagtcgtgagagagagagagaaagacgtagatcgagagaaagatcacctcagaggaaacgttcccgggaaagatctccacgaagagagcgagagcgatcacctcggagagttcgacgtgttgttccacgttacacagttcagttttcaaagttttctttagattgtcccagttgtgacatgatggaactaaggcgccgttatcaaaatttgtatatacctagtgacttttttgatgctcaatttacatgggtggatgctttccctttgtcaagaccatttcagctgggaaattactgcaatttttatgtaatgcacagagaagtagagtccttagaaaaaaatatggccattcttgatccaccagatgctgaccacttatacagtgcaaaggtaatgctgatggctagccctagtatggaagatttatatcataagtcatgtgctcttgctgaggacccacaagaacttcgagatggattccaacatcctgctagacttgttaagtttttagtgggcatgaaaggcaaggatgaagctatggccattggaggccactggtctccttcgttggatggaccagacccagaaaaagatccctctgtgttgattaagactgctattcgttgttgtaaggctctgacaggcattgatctaagtgtgtgcacacaatggtaccgttttgcagagattcgctaccatcgccctgaggagacccacaaggggcgtacagttccagctcatgtggagacagtggttttatttttcccggatgtgtggcagtacctccacacgagcaaggggaaaccgtccagggataaacgcatgtcgcacacaccgcgacacccgcgcgccgaacacacacacaggccgcggataaaaacaccccagcgaggctgcccaaccagtactcagagagccacgagaacacgcgacatacacaccgcgtacgacaaacactatggctacaccaagannn

SEQ ID NO: 14075 - DNA, 814 bp, Homo sapiens
  misc_feature 1, 2: n = A,T,C or G
nnctccaccatgtgaccatcgtcatctatcccagaataccgctgctctctcaggggcatttgtatcccagttttgggtcttaaacgagctgccaagggaggggtttctccctagagtcctcacctcctctcttgtctactctgggcggcctagggatatgtttgtcttgcggaggcgcaagcactgtgggcccaaaagtggggagcctgctctccctggtaaggggagggcaccactgggatcactggtgccatctcctgcaatggatcttctgatgttgggtcgaacagaacttcaggagttgatttccctcggcgggtggaagcggatccttccttggctatctgtccctttgctactactaccactgctgctgcctgccctcttagccactgtggggggtttagcaccagctgtaaccaagtgtctatgtatgggaactggtctgagtgtcctgacttaccagttaccttgtgccatacctttgaaacaagggacctgtccaggcttccttctgatggccaacccacctctaatgctggccagtctatttcacacaaagttctaagtttccctggtgtcatagtaaccccatagtctccattaaatcccttcctgaaatttttctagcatagttcctagcggggtaggtcttactttgtgtcttgacccatgcttcctcgagacaaaacaccacgctcacacctacacgcacaccacagaacaaagaacgggtaaaaagggcacacacacactttttcagtttacaccaaaccaaaatcaaaaccaaaatcagagtatcaacggacgcgtg

SEQ ID NO: 14076 - DNA, 1503 bp, Homo sapiens
ccacgcgtccgattatgtatatacacgtattatatatatacacgtatgtatatacacgtatatatattatatatattcatgtgtttgtatatatattatatatacgtgtatacacgtatatacatgtatacatgtatacgtgtatacatgtatatatgtgtataatatatatacacgtgtatatatattatatatatatacgtgtgccatgttggtttgctgcacccattaactcgtcatttacattaggtatttctcctaatgctatccctcccccagccctcaccccatgacaggccctggtgtgtgatgttccccgtcctgtgtccaagtgttctcattgttcagttcccacccatgagtgagaacatgctcgcaccgccgcttctaaatgttttaaaaacaaagacaccaatgcccttcattggggaaatgaaagacttttaagtaaaacgattttgagtgaaataatatttgttgttttaaaaagttaatattaaccactctccatcatatattgaaattaacttaagatgtgaaagttaaaattagaaaccttgtaaaggaaaaataggaaatagtttcatgaacttgacacaggaaaatatttcttagactagatactgtagcactcaccacaataagaaatcaagcgaattgcacttcatttttaaaaagcttctccttattatgttgttgtttaacaacttaaacgctatctctagaccaggaataattatttgctatataatacagcaaaaaatatgtatgtataaatggactcattcaaaatatataaagaactcctattacaaagaaattgacaaacagcccagtatatcaatgaatataaaaatttgagaagatattttccataagaagatatctaaatgaacattaggcatgagaaaaccaaattttaggatatcactacacacctggtgtagtttaaaagactgaaaatattaagtgtgtgggaatgtagagcaactgaaaatggcctacatctttcatagaaatgtaaaacaatacaaatactttgcaaaactctgtccaacattttctacccattcaccaagcaactccatccctagctatagatacccaggaaaataagtatgtatcttcacagaaataattgtatgagaatattcatagttacttatgcacagtagttatcaagtaaacctgtctcccatcagaaaaatggatataaaattgtgtgataatcatacaatcaataggatattacttggccaaaacaaaatgaaacaagggaaaaacacaatcaaacaaattagtggcatatatacccacctgagtaaagagaagtcggccgggtgcggtggctcacgcctgtaatcccagcactttgggaggccgaggcggcagatcacgaggtcaggagatcgagaccatcgtggctaacacagtgaaaccccgtctctactaaaaatacaaaaaaaaaaaaaagtcgacgcggccgcgaatttagtagtagta

SEQ ID NO: 14077 - DNA, 448 bp, Homo sapiens
  misc_feature 1, 2, 3, 4, 5, 6, 7, 8: n = A,T,C or G
nnnnnnnnaatttggttggccaattaagaaatgcctttttcagttggtgtattgaaagctttcctttaaacattttcacctgctcattgtgattcctccttttagtctaatatctttccaggtcatacttgtttttaatcattaaatattttcttcctggttttggagactaagctgataaactttttttaaaacttaagcattgtcattgctattttttttaatttgactttcctaggagtttaagatcagccatgaccaacatggtgaaaccccatctctattaaatacacaaaataaaaatgagccaccgtgcctggccagaataggttttttctttcaacttgatcagtagaaaatggacatcaagtttgaacagataaatcatggacagccttattgtgattgaaatgcttgtaggttctgtgccaattttccaccactgtgt

SEQ ID NO: 14078 - DNA, 2308 bp, Homo sapiens
  misc_feature 1, 203, 209, 228, 236, 260, 262, 2308: n = A,T,C or G
nacttaataactaattttgatgttcatgattagcctctggcaaacgtttgaggaaatgaatctatagagaatggacgggctttaggacttctacaagaccttcgatctttagaaagggatgaaggatgcaaccatctacaaaaagttctatttgtattattcagcaatatgtaaagagctggaatttggcatcgccctcttanctgatngccgagctgctgaaagctncacaggantcatatccccagaaccaaccaatncnatcacatcatcctggctcagaagccccaggtcccttccatccccaatccttttgcgtggcccatgttttaaaaacctgcggagagaaggacggggtgccaggaagcctgttgattcaacgtgccacccgattcacgggttccgggtgtcactgggctgggaaaagctttcggactctgagcaactacagcgctttcctcccccttccccccatagagcagggaaggccaggctcccccttcttcccgcatacggctccccactgcctcttcccttacgtgaccaggccctaggagcccggatccccacctgactcctgcgagaaacacgctctccagtcggaactttacctgtctgaagcccgccgctcctccagtgcgctaagcccccaccgaggaaaatggagtcgtcgaaccgagactgggaaaagatagtacggacccaccgcacggcccctccgccgccaccgccgccgctgctgcgtcaacgtgctacgtcatttccggctccccgacaccgggagtgggcgggccatttcttgttctctctcccgctctcggaagctttcgtctcgtgggtgcgaaaggtaaccgaagcggctcaggaaggcagctgtcactgagcccctggaacagagcgagagtatcgtaagtaaccaggctcagccggtttctcaggccgctctagtcaaataaaccataaagatcagactcgggcttcttcacttccttctctccgtggtttcgccattagcttccggttccggggaggggccgagttttcttcgaagatttggggctccgcgatacagttaggatggctgtagtacctctgctgttgttggggggtttgtggagcgctgtgggagcgtccagcctgggtgtcgttacttgcggctccgtggtgaagctactcaatacgcgccacaacgtccgactgcactcacacgacgtgcgctatgggtcaggtagtgggcagcagtcagtgacaggtgtaacctctgtggatgacagcaacagttactggaggatacgggggaagagtgccacagtgtgtgagaggggaacccccatcaagtgtggccagcccatccggctgacacatgtcaacactggccgaaacctccatagtcaccacttcacttcacctctttctggaaaccaggaagtgagtgcttttggtgaggaaggtgaaggtgattatctggatgactggacagtgctctgtaatggaccctactgggtgagagatggtgaggtgcggttcaaacactcttccactgaggtactgctgtctgtcacaggagaacaatatggtcgacctatcagtgggcaaaaagaggtgcatggcatggcccagccaagtcagaacaactactggaaagccatggaaggcatcttcatgaagcccagtgagttgttgaaggcagaagcccaccatgcagagctgtgaatctagaggctctgagccactgttaacgcacaatgttcacagacatctgttgctgcctcaccttgggatccctgccacaagttccttgggcagtggccatgtcaccattgagatgaagatatacaacagaaaatagtggctgtgtttggaagcttcagccctgcacatttgaactagtcactctcccagacttgcgtgggtcagttctttctgagtagaggacttgctggtaaaggggcagatgctttttattagtactgataaaacaaactgagggaaacatccctcttagctgggaaacttttactcttcaggagcttggcatcatggactgttaatgtatgtgattttccccctattttctctctccaaaatgataaaaacaataattttaacagacaaagaaagacgccaggtgtccccgcgggccccataaacggaaccagcctcgtggcaagggcccaaagaggcgaaaaagagagcgggcggactaaagcgcagggaaaaggacagagtaggcgagacaccccggggcactggagacacacaaaacagagaacacgggtgggacactcggagtgagtataaagtgcan

SEQ ID NO: 14079 - DNA, 1073 bp, Homo sapiens
  misc_feature 1068, 1069, 1070, 1071, 1072, 1073: n = A,T,C or G
gcgtccgctggagtgcaatgtcgcgatctcagctcaccacaacctccgcctcccaggttcaaacaattctcctgcctcggcctcccgagtagctgggattacaggcatgcgccaccacacctggctaattttttttttgtatttttagtagagatggggtttctccatgttggtcaggctggtctcgaactcctgacctcaggtgatccatccacctcggcctcccaaagtgctgggattagaggcgtgagccactgtgcccggcctataatttttgatagatgattttgaattattttccagagataaaattttaaatgtttccattatatcactgatttatttctgcaaattgaataaattcttaattttctgcatgcacataatacaaaaggtattttcatagttttggatttataccaaatgaaaaggattctcttgatgagcacctttaactgatttttctgttaaagttttaacaatttgttcttggaagtcagttcgtgaaggcaagtttgtcagtattttcacaaaactattcagctgaatccagaaagtgaaacagcaagaatttgcattgtaaaattgtgttataaaattggactttgaaatttcaaaaataagaaaaattttcatgtgtatttatactaaataccgttttaggaaactaggatcagggtgtttctgttggcgttggcattaactagctggatgtaaatttgaaaagccactcaagcagcttcctagtctagaaagtcagaggtttagattagatttccgacatcccttccatttctgacctgtagttcttgtctggaattctgctttgttataaactattgttctaaggagtttgttgtgatagcacatagttcattttgtaaagattccctgcgtataaagtgatgccctacatatgtgattttgtattaaaagtatataggatcattattttattttgaaaaatttaaatacagaaaagtataaaatataagtaccatcgccgaataaagtgtacgtttggcaatgtctatttggaaaaggagcactaaaaacaaagggcgtaannnnnn

SEQ ID NO: 14080 - DNA, 848 bp, Homo sapiens
  misc_feature 1, 2, 844, 845, 846, 847, 848: n = A,T,C or G
nnggctgcaacctgtgagattagcaacattttaagcaactacttcagtgcgatgtacagctcggaggactccaccctggcctctgttccccctgctgccaccttgggggccgatgacttggtactgaccctgagcaacccccagatgtcattggagggtacaggtgggtctcagcggggtgggatggggcacggagtgggagacagatccatctaagggcctgttagacaaatgggggaataggcagggaggagggtctctaggcaaattccagggctagaggctgagacttagtgactgaggtgctgggggttgtggggctgtgacaggcagagggaggtgtcagataccaggacaagggtgttgtgaatgctacctcctgcccctactcttgggatggctccaagggctgaggtgtgaatccccagtgtgctccaggaatggggctgtgtgggctgggagtggtggctcacgcctgtaatcccagcactttgggaggctgagctgagcggatcacctgaggtcaagagttcgagaccagcctagccaacatggtgaaaccccgtctctactaaaaatacaaaaaaaaatttatcccagcgtggtggtgggcacctataatcccagctactggggaggctgacgcaggagtatcgcttgaacctgggaggtggaggttgctgtgagccgagattgtgccattgcaccccagcctaggtgacaggagtgagacttcatcttaaaaaacaaaaaaaaaaactcgaggggggggcccggtacccaaatcgccctatagggagtcgtattaccattcaattggccgtcggtttacaacgtcgtgacnnnnn

SEQ ID NO: 14081 - DNA, 4185 bp, Homo sapiens
cacgcgtccgcggacgcgtgggttatggcggcgctggagagggggcgctgagctgttgggtatgaagtgtaacagaacagactttaccacctgaaactgctgcttcaagttcagatcaggcaaggaacaaacctcgtaacaactaacaagaccaaagaagagtacacttaagttgaagacacaacacttgatctgaaacaagaagtttgtgcctactcaacagctttgaaagagcacttcccaacgctgctagtagtctttgttttcttcagtgctgtactgtgagattgcccggtacagcagcagttgtattctttattagcttggtagatcattttctctcgctcttttttttaatactagcaactttcatcctttgaaacgtgtgctgaaaaagaagaatcagcaaatactactgaaagtgcaatatttgagtatcactgcgagatgagctttgatccaaaccttctccacaacaatggacataatgggtaccctaatggtacttcagcagcactgcgtgaaactggggttattgaaaaactgttaacctcttacggatttattcagtgttcagaacgtcaagctagacttttcttccactgttcacagtataatggcaacctgcaagacttaaaagtaggagatgatgttgaatttgaagtatcatcggaccgacggactgggaaacccattgctgttaaactggtgaagataaaacaagaaatcctccctgaagaacgaatgaatggacaagaagtgttttatctgacttacacccctgaagatgtcgaagggaacgttcagctggaaactggagataaaataaactttgtaattgataacaataaacatactggtgctgtaagtgctcgcaacattatgctgttgaaaaagaaacaagcccgctgtcagggagtagtttgtgccatgaaggaggcatttggctttattgaaagaggtgatgttgtaaaagagatattctttcactatagtgaatttaagggtgacttagaaaccttacagcctggcgatgatgtggaattcacaatcaaggacagaaatggtaaagaagttgcaacagatgtcagactattgcctcaaggaacagtcatttttgaagatatcagcattgaacattttgaaggaactgtaaccaaagttatcccaaaagtacccagtaaaaaccagaatgacccattgccaggacgcatcaaagttgactttgtgatccctaaagaacttccctttggagacaaagatacgaaatccaaggtgaccctgctggaaggtgaccatgttaggtttaatatttcaacagaccgacgtgacaaattagagcgagcaaccaatatagaagttctgtcaaatacatttcagttcactaatgaagcccgagaaatgggtgtgattgctgccatgagagatggttttggtttcatcaagtgtgtggatcgtgatgttcgtatgttcttccacttcagtgaaattctggatgggaaccagctccatattgcagatgaagtagagtttactgtggttcctgatatgctctctgctcaaagaaatcatgctattaggattaaaaaacttcccaagggcacggtttcatttcattcccattcagatcaccgttttctgggcacggtagaaaaagaagccactttttccaatcctaaaaccactagcccaaataaaggcaaagagaaggaggctgaggatggcattattgcttatgatgactgtggggtgaaactgactattgcttttcaagccaaggatgtggaaggatctacttctcctcaaataggagataaggttgaatttagtattagtgacaaacagaggcctggacagcaggttgcaacttgtgtgcgacttttaggtcgtaattctaactccaagaggctcttgggttatgtggcaactctgaaggataattttggatttattgaaacagccaatcatgataaggaaatctttttccattacagtgagttctctggtgatgttgatagcctggaactgggggacatggtcgagtatagcttgtccaaaggcaaaggcaacaaagtcagtgcagaaaaagtgaacaaaacacactcagtgaatggcattactgaggaagctgatcccaccatttactctggcaaagtaattcgccccctgaggagtgttgatccaacacagactgagtaccaaggaatgattgagattgtggaggagggcgatatgaaaggtgaggtctatccatttggcatcgttgggatggccaacaaaggggattgcctgcagaaaggggagagcgtcaagttccaattgtgtgtcctgggccaaaatgcacaaactatggcttacaacatcacacccctgcgcagggccacagtggaatgtgtgaaagatcagtttggcttcattaactatgaagtaggagatagcaagaagctctttttccatgtgaaagaagttcaggatggcattgagctacaggcaggagatgaggtggagttctcagtgattcttaatcagcgcactggcaagtgcagcgcctgtaatgtttggcgagtctgtgagggccccaaggctgttgcagctcctcgacctgatcggttggtcaatcgcttgaagaatatcactctggatgatgccagtgctcctcgcctaatggttcttcgtcagccaaggggaccagataactcaatggggtttggtgcagaaagaaagatccgtcaagctggtgtcattgactaaccacatccacaaagcacaccattaatccactatgatcaagttggggggaatctggtgaagggttctgaatatctccctcttcatccctcccgaaatctggaatacttattctattgagctattacaccagttttaacaccttcctcgtgttatgtttaaaaaaataaataaatttaagaaaaccattttaaataatgcacagttgcagcctggaaaaacttaaggtggcgccttatagtatcaattttaggagctttatttggtgcatttaacgcaactggtaattgcagaatccactttgcctgtgtaagtgaaaaatatagactgttatcttgttggccctatgaaattctgcacttttcattatatactctaccttcattaattacttctggcaagatgttctgccttagcactcagttgcattcttttcctttttcttcctgttcattatgctttaattctgaggaccatatgagggtagaatatattatcttttaaaaattacaaaaatttgtataggcaaaccatttcttaaagttgatggccaaattttaaaatgttatttttcatatcatttataatcttgtcacaatccacttaaagaagtttggttatatttcagtgaaaattttcttccagagtaggttttttttcgtgggttggggggtaactttactacaattagtaagtatggtgcagaatttcatgcaaatgaggagtgccagcagtgtgataatttaaacatatttaaacaaaaacaaaaaaaatgaatgcacaaacttgctgctgcttagatcactgcagcttctaggacccggtttcttttactgatttaaaaacaaaacaaaaaaaaataaaaaagttgtgcctgaaatgaatcttgtttttttttataagtagccgcctggttactgtgtcctgtaaaatacagacacttgacccttggtgtagcttctgttcaactttatatcacgggaatggatgggtctgatttcttggccctcttcttgaattggccatatacagggtccctggccagtggactgaaggctttgtctaagatgacaagggtcagctcaggggatgtgggggagggcggttttatcttcccccttgtcgtttgaggttttgatctctgggtaaagaggccgtttatctttgtaaacacgaaacatttttgctttctccagttttctgttaatggcgaaagaatggaagcgaataaagttttactgatttttgagacactaaaaaaaaaaatatacagacactaataaaagaaaaaaaaaggggggtaaatatcctgggggcgcaaatcaccttttaaagggcctaagggatataagggcgggcaaacagagagaaaggggtttgagacctttgttgtgaccccaacggataagttgcgtcttgtcttcaaaaataggtcta

SEQ ID NO: 14082 - DNA, 542 bp, Homo sapiens
acagaaaaggcgaatctgtgttctgtatattctgcctaaggcaaagaaatgtttagctctctttaaaatagttccataattttttctaaaaagcttgcttgaaaactgtagcttccatatctggagcatttcactttaaatatttggataaatatgttatcttcttacttggacatttcatgtgtttagggattgtcttctaaattcttcctaattcatatagctgctaacacttcccgcagagctaaaccattacagatatgaaataaagacctattgatttgactcacccaaaaaaaaaaaaaaaaaaaaaaggtaccgcggccgttaaacatgtgtcactgggcaggcggtgcctctaatactggtgatgctagaggtgatgtttttggtaaacaggcggggtaagatttgccgagttccttttacttttttttaacctttccttatgagcatgcctgtgttgggttgacagtgagggtaataatgacttgttggttgattgtagatattgggctgttaattgtcagttcagcccgcgt

SEQ ID NO: 14083 - DNA, 1603 bp, Homo sapiens
ggttctgcttgtactccgttgttgttgccctgtgtctgtttctcgccgtgttctcgctctctcatgctccgtggattgctttgtgtcctaactttgtttactgtgtggtactgttgtgtatctccctgtttgcgtttcttggtgcagccgtacgggtctctcgtcggttggttccgcgctgttttccgccgttttctactatatttgtcctgtttggtcgttttcgtggtaccttgtcttgtttccttaatggttttttgggaatatttttttgtttcagccattcctgggtgatttcaccagtttggattaaatgtggtccaataatggacagtgtcttcgcccccgttttcaccatgggcaaatatatacgcaagggcgttcaggtgctgatgccgctggcgattcaggttcatcatgccgtttgtgatggcttccatgtcggcaagaatgcttaatgaattacaacagtacttgcgatgagtggcaggtcggggcgtaattggtacgtcgacgtagaacgcggctacaattaatacataaccttatgtatcatacacatacgattttggtgacactatagaactcgaaggatccacaagtttgtacaaaaaagcaggcttgtaaaacgacggccagtaactataacggtcctaaggtagcgaggcctgggtggcgaattcggcacgaggcttaccgccatcttggctcctgtggaggcctgctgggaacgggacttctaaaaggaactatgtctggaaggctgtggtccaaggccatttttgctggctataagcggggtctccggaaccaaagggagcacacagctcttcttaaaattgaaggtgtttacgcccgagatgaaacagaattctatttgggcaagagatgcgcttatgtatataaagcaaagaacaacacagtcactcctggcggcaaaccaaacaaaacccagagtcatctggggaaaagtaactcgggcccatggaaacagtggcatggttcgtgccaaattccgaagcaatcttcctgctaagggcccattggacacagaatccgagtgatgctgtacccctcaaggatttaaactaacgaaaaatcaataaataaatgtggatttgtgctcttgtatttttaagtggattaaaaaacttactaccttaaattgatttgctacatgcttaaaatgatagaggttgctcagcatttttggagtacaagggggtcagagagacatgtgatgaaaattacagggcgagtacagagatttagaagggaacgggttttaatgcgagtatctttgacagagtcttgctctgttgcccatgctggagtgtagtggtgctcgctgcagcctcacattcaaaggctcaagcaatcctcccttggcctttgaagtagctgggaccacaggctcatgccaccatccctgggtcatttttaaattttttgtagagagggtctgactcttgcctatgctgggttcaaactcctgggctcaagcaatcctccttccttggcctctcctgaagtgctgggatacagttatgagccaccacacctgccaagtgctttgtgatactatgcatttgttcaatgcaga

SEQ ID NO: 14084 - DNA, 874 bp, Homo sapiens
  misc_feature 872, 873, 874: n = A,T,C or G
gggagatctgtgtcagaacgtgcgtgtgagcggatacaaaacccgagagaggcgtgagcagcgctgtgtttgcgagcgggagcgaggggcgccggctggggtgtgtgctctcagaaaccaggctgctttcaggaacattgctgtggattcccagctttcagacaacacatgactaagacagaatgagaccactctagttgcctcatgggaaactcgggaaaagactgcaaaaacaacattgtttctccctttggaattctggagttataaggcagaggtcccccatcttcccgaactggcctattccactagaagcaagatggctgaactcaatactcatgtgaatgtcaaggaaaagatctatgcagttagatcagttgttcccaacaaaagcaataatgaaatagtcctggtgctccaacagtttgattttaatgtggataaagccgtgcaagcctttgtggatggcagtgcaattcaagttctaaaagaatggaatatgacaggaaaaaagaagaacaataaaagaaaaagaagcaagtccaagcagcatcaaggcaacaaagatgctaaagacaaggtggagaggcctgaggcagggcccctgcagccgcagccaccacagattcaaaacggccccatgaatggctgcgagaaggacagctcgtccacagattctgctaacgaaaaaccagcccttatccctcgtgagaaaaagatctcgatacttgaggaaccttcaaaggcacttcgtggggtcacaggcccaaatattgagaaatcagtgaaggatttgcaacgctgcaccgtttctctaactagatatcgcgtcatgattcaggaagaaggtggatagttccgtgaagaagaannn
